United States Patent Application Publication US 2025/0051766 A1 - sequence listing, part 2

SEQ ID NO: 5065 - DNA, 58617616 bp, Homo sapiens (residues 1-2,171,023 of 58,617,616)
  source 1..58617616: mol_type = genomic DNA
nnnnnnnnnnnnnnnnnnnnnnnnnnnnnnnnnnnnnnnnnnnnnnnnnnnnnnnnnnnnnnnnnnnnnnnnnnnnnnnnnnnnnnnnnnnnnnnnnnnnnnnnnnnnnnnnnnnnnnnnnnnnnnnnnnnnnnnnnnnnnnnnnnnnnnnnnnnnnnnnnnnnnnnnnnnnnnnnnnnnnnnnnnnnnnnnnnnnnnnnnnnnnnnnnnnnnnnnnnnnnnnnnnnnnnnnnnnnnnnnnnnnnnnnnnnnnnnnnnnnnnnnnnnnnnnnnnnnnnnnnnnnnnnnnnnnnnnnnnnnnnnnnnnnnnnnnnnnnnnnnnnnnnnnnnnnnnnnnnnnnnnnnnnnnnnnnnnnnnnnnnnnnnnnnnnnnnnnnnnnnnnnnnnnnnnnnnnnnnnnnnnnnnnnnnnnnnnnnnnnnnnnnnnnnnnnnnnnnnnnnnnnnnnnnnnnnnnnnnnnnnnnnnnnnnnnnnnnnnnnnnnnnnnnnnnnnnnnnnnnnnnnnnnnnnnnnnnnnnnnnnnnnnnnnnnnnnnnnnnnnnnnnnnnnnnnnnnnnnnnnnnnnnnnnnnnnnnnnnnnnnnnnnnnnnnnnnnnnnnnnnnnnnnnnnnnnnnnnnnnnnnnnnnnnnnnnnnnnnnnnnnnnnnnnnnnnnnnnnnnnnnnnnnnnnnnnnnnnnnnnnnnnnnnnnnnnnnnnnnnnnnnnnnnnnnnnnnnnnnnnnnnnnnnnnnnnnnnnnnnnnnnnnnnnnnnnnnnnnnnnnnnnnnnnnnnnnnnnnnnnnnnnnnnnnnnnnnnnnnnnnnnnnnnnnnnnnnnnnnnnnnnnnnnnnnnnnnnnnnnnnnnnnnnnnnnnnnnnnnnnnnnnnnnnnnnnnnnnnnnnnnnnnnnnnnnnnnnnnnnnnnnnnnnnnnnnnnnnnnnnnnnnnnnnnnnnnnnnnnnnnnnnnnnnnnnnnnnnnnnnnnnnnnnnnnnnnnnnnnnnnnnnnnnnnnnnnnnnnnnnnnnnnnnnnnnnnnnnnnnnnnnnnnnnnnnnnnnnnnnnnnnnnnnnnnnnnnnnnnnnnnnnnnnnnnnnnnnnnnnnnnnnnnnnnnnnnnnnnnnnnnnnnnnnnnnnnnnnnnnnnnnnnnnnnnnnnnnnnnnnnnnnnnnnnnnnnnnnnnnnnnnnnnnnnnnnnnnnnnnnnnnnnnnnnnnnnnnnnnnnnnnnnnnnnnnnnnnnnnnnnnnnnnnnnnnnnnnnnnnnnnnnnnnnnnnnnnnnnnnnnnnnnnnnnnnnnnnnnnnnnnnnnnnnnnnnnnnnnnnnnnnnnnnnnnnnnnnnnnnnnnnnnnnnnnnnnnnnnnnnnnnnnnnnnnnnnnnnnnnnnnnnnnnnnnnnnnnnnnnnnnnnnnnnnnnnnnnnnnnnnnnnnnnnnnnnnnnnnnnnnnnnnnnnnnnnnnnnnnnnnnnnnnnnnnnnnnnnnnnnnnnnnnnnnnnnnnnnnnnnnnnnnnnnnnnnnnnnnnnnnnnnnnnnnnnnnnnnnnnnnnnnnnnnnnnnnnnnnnnnnnnnnnnnnnnnnnnnnnnnnnnnnnnnnnnnnnnnnnnnnnnnnnnnnnnnnnnnnnnnnnnnnnnnnnnnnnnnnnnnnnnnnnnnnnnnnnnnnnnnnnnnnnnnnnnnnnnnnnnnnnnnnnnnnnnnnnnnnnnnnnnnnnnnnnnnnnnnnnnnnnnnnnnnnnnnnnnnnnnnnnnnnnnnnnnnnnnnnnnnnnnnnnnnnnnnnnnnnnnnnnnnnnnnnnnnnnnnnnnnnnnnnnnnnnnnnnnnnnnnnnnnnnnnnnnnnnnnnnnnnnnnnnnnnnnnnnnnnnnnnnnnnnnnnnnnnnnnnnnnnnnnnnnnnnnnnnnnnnnnnnnnnnnnnnnnnnnnnnnnnnnnnnnnnnnnnnnnnnnnnnnnnnnnnnnnnnnnnnnnnnnnnnnnnnnnnnnnnnnnnnnnnnnnnnnnnnnnnnnnnnnnnnnnnnnnnnnnnnnnnnnnnnnnnnnnnnnnnnnnnnnnnnnnnnnnnnnnnnnnnnnnnnnnnnnnnnnnnnnnnnnnnnnnnnnnnnnnnnnnnnnnnnnnnnnnnnnnnnnnnnnnnnnnnnnnnnnnnnnnnnnnnnnnnnnnnnnnnnnnnnnnnnnnnnnnnnnnnnnnnnnnnnnnnnnnnnnnnnnnnnnnnnnnnnnnnnnnnnnnnnnnnnnnnnnnnnnnnnnnnnnnnnnnnnnnnnnnnnnnnnnnnnnnnnnnnnnnnnnnnnnnnnnnnnnnnnnnnnnnnnnnnnnnnnnnnnnnnnnnnnnnnnnnnnnnnnnnnnnnnnnnnnnnnnnnnnnnnnnnnnnnnnnnnnnnnnnnnnnnnnnnnnnnnnnnnnnnnnnnnnnnnnnnnnnnnnnnnnnnnnnnnnnnnnnnnnnnnnnnnnnnnnnnnnnnnnnnnnnnnnnnnnnnnnnnnnnnnnnnnnnnnnnnnnnnnnnnnnnnnnnnnnnnnnnnnnnnnnnnnnnnnnnnnnnnnnnnnnnnnnnnnnnnnnnnnnnnnnnnnnnnnnnnnnnnnnnnnnnnnnnnnnnnnnnnnnnnnnnnnnnnnnnnnnnnnnnnnnnnnnnnnnnnnnnnnnnnnnnnnnnnnnnnnnnnnnnnnnnnnnnnnnnnnnnnnnnnnnnnnnnnnnnnnnnnnnnnnnnnnnnnnnnnnnnnnnnnnnnnnnnnnnnnnnnnnnnnnnnnnnnnnnnnnnnnnnnnnnnnnnnnnnnnnnnnnnnnnnnnnnnnnnnnnnnnnnnnnnnnnnnnnnnnnnnnnnnnnnnnnnnnnnnnnnnnnnnnnnnnnnnnnnnnnnnnnnnnnnnnnnnnnnnnnnnnnnnnnnnnnnnnnnnnnnnnnnnnnnnnnnnnnnnnnnnnnnnnnnnnnnnnnnnnnnnnnnnnnnnnnnnnnnnnnnnnnnnnnnnnnnnnnnnnnnnnnnnnnnnnnnnnnnnnnnnnnnnnnnnnnnnnnnnnnnnnnnnnnnnnnnnnnnnnnnnnnnnnnnnnnnnnnnnnnnnnnnnnnnnnnnnnnnnnnnnnnnnnnnnnnnnnnnnnnnnnnnnnnnnnnnnnnnnnnnnnnnnnnnnnnnnnnnnnnnnnnnnnnnnnnnnnnnnnnnnnnnnnnnnnnnnnnnnnnnnnnnnnnnnnnnnnnnnnnnnnnnnnnnnnnnnnnnnnnnnnnnnnnnnnnnnnnnnnnnnnnnnnnnnnnnnnnnnnnnnnnnnnnnnnnnnnnnnnnnnnnnnnnnnnnnnnnnnnnnnnnnnnnnnnnnnnnnnnnnnnnnnnnnnnnnnnnnnnnnnnnnnnnnnnnnnnnnnnnnnnnnnnnnnnnnnnnnnnnnnnnnnnnnnnnnnnnnnnnnnnnnnnnnnnnnnnnnnnnnnnnnnnnnnnnnnnnnnnnnnnnnnnnnnnnnnnnnnnnnnnnnnnnnnnnnnnnnnnnnnnnnnnnnnnnnnnnnnnnnnnnnnnnnnnnnnnnnnnnnnnnnnnnnnnnnnnnnnnnnnnnnnnnnnnnnnnnnnnnnnnnnnnnnnnnnnnnnnnnnnnnnnnnnnnnnnnnnnnnnnnnnnnnnnnnnnnnnnnnnnnnnnnnnnnnnnnnnnnnnnnnnnnnnnnnnnnnnnnnnnnnnnnnnnnnnnnnnnnnnnnnnnnnnnnnnnnnnnnnnnnnnnnnnnnnnnnnnnnnnnnnnnnnnnnnnnnnnnnnnnnnnnnnnnnnnnnnnnnnnnnnnnnnnnnnnnnnnnnnnnnnnnnnnnnnnnnnnnnnnnnnnnnnnnnnnnnnnnnnnnnnnnnnnnnnnnnnnnnnnnnnnnnnnnnnnnnnnnnnnnnnnnnnnnnnnnnnnnnnnnnnnnnnnnnnnnnnnnnnnnnnnnnnnnnnnnnnnnnnnnnnnnnnnnnnnnnnnnnnnnnnnnnnnnnnnnnnnnnnnnnnnnnnnnnnnnnnnnnnnnnnnnnnnnnnnnnnnnnnnnnnnnnnnnnnnnnnnnnnnnnnnnnnnnnnnnnnnnnnnnnnnnnnnnnnnnnnnnnnnnnnnnnnnnnnnnnnnnnnnnnnnnnnnnnnnnnnnnnnnnnnnnnnnnnnnnnnnnnnnnnnnnnnnnnnnnnnnnnnnnnnnnnnnnnnnnnnnnnnnnnnnnnnnnnnnnnnnnnnnnnnnnnnnnnnnnnnnnnnnnnnnnnnnnnnnnnnnnnnnnnnnnnnnnnnnnnnnnnnnnnnnnnnnnnnnnnnnnnnnnnnnnnnnnnnnnnnnnnnnnnnnnnnnnnnnnnnnnnnnnnnnnnnnnnnnnnnnnnnnnnnnnnnnnnnnnnnnnnnnnnnnnnnnnnnnnnnnnnnnnnnnnnnnnnnnnnnnnnnnnnnnnnnnnnnnnnnnnnnnnnnnnnnnnnnnnnnnnnnnnnnnnnnnnnnnnnnnnnnnnnnnnnnnnnnnnnnnnnnnnnnnnnnnnnnnnnnnnnnnnnnnnnnnnnnnnnnnnnnnnnnnnnnnnnnnnnnnnnnnnnnnnnnnnnnnnnnnnnnnnnnnnnnnnnnnnnnnnnnnnnnnnnnnnnnnnnnnnnnnnnnnnnnnnnnnnnnnnnnnnnnnnnnnnnnnnnnnnnnnnnnnnnnnnnnnnnnnnnnnnnnnnnnnnnnnnnnnnnnnnnnnnnnnnnnnnnnnnnnnnnnnnnnnnnnnnnnnnnnnnnnnnnnnnnnnnnnnnnnnnnnnnnnnnnnnnnnnnnnnnnnnnnnnnnnnnnnnnnnnnnnnnnnnnnnnnnnnnnnnnnnnnnnnnnnnnnnnnnnnnnnnnnnnnnnnnnnnnnnnnnnnnnnnnnnnnnnnnnnnnnnnnnnnnnnnnnnnnnnnnnnnnnnnnnnnnnnnnnnnnnnnnnnnnnnnnnnnnnnnnnnnnnnnnnnnnnnnnnnnnnnnnnnnnnnnnnnnnnnnnnnnnnnnnnnnnnnnnnnnnnnnnnnnnnnnnnnnnnnnnnnnnnnnnnnnnnnnnnnnnnnnnnnnnnnnnnnnnnnnnnnnnnnnnnnnnnnnnnnnnnnnnnnnnnnnnnnnnnnnnnnnnnnnnnnnnnnnnnnnnnnnnnnnnnnnnnnnnnnnnnnnnnnnnnnnnnnnnnnnnnnnnnnnnnnnnnnnnnnnnnnnnnnnnnnnnnnnnnnnnnnnnnnnnnnnnnnnnnnnnnnnnnnnnnnnnnnnnnnnnnnnnnnnnnnnnnnnnnnnnnnnnnnnnnnnnnnnnnnnnnnnnnnnnnnnnnnnnnnnnnnnnnnnnnnnnnnnnnnnnnnnnnnnnnnnnnnnnnnnnnnnnnnnnnnnnnnnnnnnnnnnnnnnnnnnnnnnnnnnnnnnnnnnnnnnnnnnnnnnnnnnnnnnnnnnnnnnnnnnnnnnnnnnnnnnnnnnnnnnnnnnnnnnnnnnnnnnnnnnnnnnnnnnnnnnnnnnnnnnnnnnnnnnnnnnnnnnnnnnnnnnnnnnnnnnnnnnnnnnnnnnnnnnnnnnnnnnnnnnnnnnnnnnnnnnnnnnnnnnnnnnnnnnnnnnnnnnnnnnnnnnnnnnnnnnnnnnnnnnnnnnnnnnnnnnnnnnnnnnnnnnnnnnnnnnnnnnnnnnnnnnnnnnnnnnnnnnnnnnnnnnnnnnnnnnnnnnnnnnnnnnnnnnnnnnnnnnnnnnnnnnnnnnnnnnnnnnnnnnnnnnnnnnnnnnnnnnnnnnnnnnnnnnnnnnnnnnnnnnnnnnnnnnnnnnnnnnnnnnnnnnnnnnnnnnnnnnnnnnnnnnnnnnnnnnnnnnnnnnnnnnnnnnnnnnnnnnnnnnnnnnnnnnnnnnnnnnnnnnnnnnnnnnnnnnnnnnnnnnnnnnnnnnnnnnnnnnnnnnnnnnnnnnnnnnnnnnnnnnnnnnnnnnnnnnnnnnnnnnnnnnnnnnnnnnnnnnnnnnnnnnnnnnnnnnnnnnnnnnnnnnnnnnnnnnnnnnnnnnnnnnnnnnnnnnnnnnnnnnnnnnnnnnnnnnnnnnnnnnnnnnnnnnnnnnnnnnnnnnnnnnnnnnnnnnnnnnnnnnnnnnnnnnnnnnnnnnnnnnnnnnnnnnnnnnnnnnnnnnnnnnnnnnnnnnnnnnnnnnnnnnnnnnnnnnnnnnnnnnnnnnnnnnnnnnnnnnnnnnnnnnnnnnnnnnnnnnnnnnnnnnnnnnnnnnnnnnnnnnnnnnnnnnnnnnnnnnnnnnnnnnnnnnnnnnnnnnnnnnnnnnnnnnnnnnnnnnnnnnnnnnnnnnnnnnnnnnnnnnnnnnnnnnnnnnnnnnnnnnnnnnnnnnnnnnnnnnnnnnnnnnnnnnnnnnnnnnnnnnnnnnnnnnnnnnnnnnnnnnnnnnnnnnnnnnnnnnnnnnnnnnnnnnnnnnnnnnnnnnnnnnnnnnnnnnnnnnnnnnnnnnnnnnnnnnnnnnnnnnnnnnnnnnnnnnnnnnnnnnnnnnnnnnnnnnnnnnnnnnnnnnnnnnnnnnnnnnnnnnnnnnnnnnnnnnnnnnnnnnnnnnnnnnnnnnnnnnnnnnnnnnnnnnnnnnnnnnnnnnnnnnnnnnnnnnnnnnnnnnnnnnnnnnnnnnnnnnnnnnnnnnnnnnnnnnnnnnnnnnnnnnnnnnnnnnnnnnnnnnnnnnnnnnnnnnnnnnnnnnnnnnnnnnnnnnnnnnnnnnnnnnnnnnnnnnnnnnnnnnnnnnnnnnnnnnnnnnnnnnnnnnnnnnnnnnnnnnnnnnnnnnnnnnnnnnnnnnnnnnnnnnnnnnnnnnnnnnnnnnnnnnnnnnnnnnnnnnnnnnnnnnnnnnnnnnnnnnnnnnnnnnnnnnnnnnnnnnnnnnnnnnnnnnnnnnnnnnnnnnnnnnnnnnnnnnnnnnnnnnnnnnnnnnnnnnnnnnnnnnnnnnnnnnnnnnnnnnnnnnnnnnnnnnnnnnnnnnnnnnnnnnnnnnnnnnnnnnnnnnnnnnnnnnnnnnnnnnnnnnnnnnnnnnnnnnnnnnnnnnnnnnnnnnnnnnnnnnnnnnnnnnnnnnnnnnnnnnnnnnnnnnnnnnnnnnnnnnnnnnnnnnnnnnnnnnnnnnnnnnnnnnnnnnnnnnnnnnnnnnnnnnnnnnnnnnnnnnnnnnnnnnnnnnnnnnnnnnnnnnnnnnnnnnnnnnnnnnnnnnnnnnnnnnnnnnnnnnnnnnnnnnnnnnnnnnnnnnnnnnnnnnnnnnnnnnnnnnnnnnnnnnnnnnnnnnnnnnnnnnnnnnnnnnnnnnnnnnnnnnnnnnnnnnnnnnnnnnnnnnnnnnnnnnnnnnnnnnnnnnnnnnnnnnnnnnnnnnnnnnnnnnnnnnnnnnnnnnnnnnnnnnnnnnnnnnnnnnnnnnnnnnnnnnnnnnnnnnnnnnnnnnnnnnnnnnnnnnnnnnnnnnnnnnnnnnnnnnnnnnnnnnnnnnnnnnnnnnnnnnnnnnnnnnnnnnnnnnnnnnnnnnnnnnnnnnnnnnnnnnnnnnnnnnnnnnnnnnnnnnnnnnnnnnnnnnnnnnnnnnnnnnnnnnnnnnnnnnnnnnnnnnnnnnnnnnnnnnnnnnnnnnnnnnnnnnnnnnnnnnnnnnnnnnnnnnnnnnnnnnnnnnnnnnnnnnnnnnnnnnnnnnnnnnnnnnnnnnnnnnnnnnnnnnnnnnnnnnnnnnnnnnnnnnnnnnnnnnnnnnnnnnnnnnnnnnnnnnnnnnnnnnnnnnnnnnnnnnnnnnnnnnnnnnnnnnnnnnnnnnnnnnnnnnnnnnnnnnnnnnnnnnnnnnnnnnnnnnnnnnnnnnnnnnnnnnnnnnnnnnnnnnnnnnnnnnnnnnnnnnnnnnnnnnnnnnnnnnnnnnnnnnnnnnnnnnnnnnnnnnnnnnnnnnnnnnnnnnnnnnnnnnnnnnnnnnnnnnnnnnnnnnnnnnnnnnnnnnnnnnnnnnnnnnnnnnnnnnnnnnnnnnnnnnnnnnnnnnnnnnnnnnnnnnnnnnnnnnnnnnnnnnnnnnnnnnnnnnnnnnnnnnnnnnnnnnnnnnnnnnnnnnnnnnnnnnnnnnnnnnnnnnnnnnnnnnnnnnnnnnnnnnnnnnnnnnnnnnnnnnnnnnnnnnnnnnnnnnnnnnnnnnnnnnnnnnnnnnnnnnnnnnnnnnnnnnnnnnnnnnnnnnnnnnnnnnnnnnnnnnnnnnnnnnnnnnnnnnnnnnnnnnnnnnnnnnnnnnnnnnnnnnnnnnnnnnnnnnnnnnnnnnnnnnnnnnnnnnnnnnnnnnnnnnnnnnnnnnnnnnnnnnnnnnnnnnnnnnnnnnnnnnnnnnnnnnnnnnnnnnnnnnnnnnnnnnnnnnnnnnnnnnnnnnnnnnnnnnnnnnnnnnnnnnnnnnnnnnnnnnnnnnnnnnnnnnnnnnnnnnnnnnnnnnnnnnnnnnnnnnnnnnnnnnnnnnnnnnnnnnnnnnnnnnnnnnnnnnnnnnnnnnnnnnnnnnnnnnnnnnnnnnnnnnnnnnnnnnnnnnnnnnnnnnnnnnnnnnnnnnnnnnnnnnnnnnnnnnnnnnnnnnnnnnnnnnnnnnnnnnnnnnnnnnnnnnnnnnnnnnnnnnnnnnnnnnnnnnnnnnnnnnnnnnnnnnnnnnnnnnnnnnnnnnnnnnnnnnnnnnnnnnnnnnnnnnnnnnnnnnnnnnnnnnnnnnnnnnnnnnnnnnnnnnnnnnnnnnnnnnnnnnnnnnnnnnnnnnnnnnnnnnnnnnnnnnnnnnnnnnnnnnnnnnnnnnnnnnnnnnnnnnnnnnnnnnnnnnnnnnnnnnnnnnnnnnnnnnnnnnnnnnnnnnnnnnnnnnnnnnnnnnnnnnnnnnnnnnnnnnnnnnnnnnnnnnnnnnnnnnnnnnnnnnnnnnnnnnnnnnnnnnnnnnnnnnnnnnnnnnnnnnnnnnnnnnnnnnnnnnnnnnnnnnnnnnnnnnnnnnnnnnnnnnnnnnnnnnnnnnnnnnnnnnnnnnnnnnnnnnnnnnnnnnnnnnnnnnnnnnnnnnnnnnnnnnnnnnnnnnnnnnnnnnnnnnnnnnnnnnnnnnnnnnnnnnnnnnnnnnnnnnnnnnnnnnnnnnnnnnnnnnnnnnnnnnnnnnnnnnnnnnnnnnnnnnnnnnnnnnnnnnnnnnnnnnnnnnnnnnnnnnnnnnnnnnnnnnnnnnnnnnnnnnnnnnnnnnnnnnnnnnnnnnnnnnnnnnnnnnnnnnnnnnnnnnnnnnnnnnnnnnnnnnnnnnnnnnnnnnnnnnnnnnnnnnnnnnnnnnnnnnnnnnnnnnnnnnnnnnnnnnnnnnnnnnnnnnnnnnnnnnnnnnnnnnnnnnnnnnnnnnnnnnnnnnnnnnnnnnnnnnnnnnnnnnnnnnnnnnnnnnnnnnnnnnnnnnnnnnnnnnnnnnnnnnnnnnnnnnnnnnnnnnnnnnnnnnnnnnnnnnnnnnnnnnnnnnnnnnnnnnnnnnnnnnnnnnnnnnnnnnnnnnnnnnnnnnnnnnnnnnnnnnnnnnnnnnnnnnnnnnnnnnnnnnnnnnnnnnnnnnnnnnnnnnnnnnnnnnnnnnnnnnnnnnnnnnnnnnnnnnnnnnnnnnnnnnnnnnnnnnnnnnnnnnnnnnnnnnnnnnnnnnnnnnnnnnnnnnnnnnnnnnnnnnnnnnnnnnnnnnnnnnnnnnnnnnnnnnnnnnnnnnnnnnnnnnnnnnnnnnnnnnnnnnnnnnnnnnnnnnnnnnnnnnnnnnnnnnnnnnnnnnnnnnnnnnnnnnnnnnnnnnnnnnnnnnnnnnnnnnnnnnnnnnnnnnnnnnnnnnnnnnnnnnnnnnnnnnnnnnnnnnnnnnnnnnnnnnnnnnnnnnnnnnnnnnnnnnnnnnnnnnnnnnnnnnnnnnnnnnnnnnnnnnnnnnnnnnnnnnnnnnnnnnnnnnnnnnnnnnnnnnnnnnnnnnnnnnnnnnnnnnnnnnnnnnnnnnnnnnnnnnnnnnnnnnnnnnnnnnnnnnnnnnnnnnnnnnnnnnnnnnnnnnnnnnnnnnnnnnnnnnnnnnnnnnnnnnnnnnnnnnnnnnnnnnnnnnnnnnnnnnnnnnnnnnnnnnnnnnnnnnnnnnnnnnnnnnnnnnnnnnnnnnnnnnnnnnnnnnnnnnnnnnnnnnnnnnnnnnnnnnnnnnnnnnnnnnnnnnnnnnnnnnnnnnnnnnnnnnnnnnnnnnnnnnnnnnnnnnnnnnnnnnnnnnnnnnnnnnnnnnnnnnnnnnnnnnnnnnnnnnnnnnnnnnnnnnnnnnnnnnnnnnnnnnnnnnnnnnnnnnnnnnnnnnnnnnnnnnnnnnnnnnnnnnnnnnnnnnnnnnnnnnnnnnnnnnnnnnnnnnnnnnnnnnnnnnnnnnnnnnnnnnnnnnnnnnnnnnnnnnnnnnnnnnnnnnnnnnnnnnnnnnnnnnnnnnnnnnnnnnnnnnnnnnnnnnnnnnnnnnnnnnnnnnnnnnnnnnnnnnnnnnnnnnnnnnnnnnnnnnnnnnnnnnnnnnnnnnnnnnnnnnnnnnnnnnnnnnnnnnnnnnnnnnnnnnnnnnnnnnnnnnnnnnnnnnnnnnnnnnnnnnnnnnnnnnnnnnnnnnnnnnnnnnnnnnnnnnnnnnnnnnnnnnnnnnnnnnnnnnnnnnnnnnnnnnnnnnnnnnnnnnnnnnnnnnnnnnnnnnnnnnnnnnnnnnnnnnnnnnnnnnnnnnnnnnnnnnnnnnnnnnnnnnnnnnnnnnnnnnnnnnnnnnnnnnnnnnnnnnnnnnnnnnnnnnnnnnnnnnnnnnnnnnnnnnnnnnnnnnnnnnnnnnnnnnnnnnnnnnnnnnnnnnnnnnnnnnnnnnnnnnnnnnnnnnnnnnnnnnnnnnnnnnnnnnnnnnnnnnnnnnnnnnnnnnnnnnnnnnnnnnnnnnnnnnnnnnnnnnnnnnnnnnnnnnnnnnnnnnnnnnnnnnnnnnnnnnnnnnnnnnnnnnnnnnnnnnnnnnnnnnnnnnnnnnnnnnnnnnnnnnnnnnnnnnnnnnnnnnnnnnnnnnnnnnnnnnnnnnnnnnnnnnnnnnnnnnnnnnnnnnnnnnnnnnnnnnnnnnnnnnnnnnnnnnnnnnnnnnnnnnnnnnnnnnnnnnnnnnnnnnnnnnnnnnnnnnnnnnnnnnnnnnnnnnnnnnnnnnnnnnnnnnnnnnnnnnnnnnnnnnnnnnnnnnnnnnnnnnnnnnnnnnnnnnnnnnnnnnnnnnnnnnnnnnnnnnnnnnnnnnnnnnnnnnnnnnnnnnnnnnnnnnnnnnnnnnnnnnnnnnnnnnnnnnnnnnnnnnnnnnnnnnnnnnnnnnnnnnnnnnnnnnnnnnnnnnnnnnnnnnnnnnnnnnnnnnnnnnnnnnnnnnnnnnnnnnnnnnnnnnnnnnnnnnnnnnnnnnnnnnnnnnnnnnnnnnnnnnnnnnnnnnnnnnnnnnnnnnnnnnnnnnnnnnnnnnnnnnnnnnnnnnnnnnnnnnnnnnnnnnnnnnnnnnnnnnnnnnnnnnnnnnnnnnnnnnnnnnnnnnnnnnnnnnnnnnnnnnnnnnnnnnnnnnnnnnnnnnnnnnnnnnnnnnnnnnnnnnnnnnnnnnnnnnnnnnnnnnnnnnnnnnnnnnnnnnnnnnnnnnnnnnnnnnnnnnnnnnnnnnnnnnnnnnnnnnnnnnnnnnnnnnnnnnnnnnnnnnnnnnnnnnnnnnnnnnnnnnnnnnnnnnnnnnnnnnnnnnnnnnnnnnnnnnnnnnnnnnnnnnnnnnnnnnnnnnnnnnnnnnnnnnnnnnnnnnnnnnnnnnnnnnnnnnnnnnnnnnnnnnnnnnnnnnnnnnnnnnnnnnnnnnnnnnnnnnnnnnnnnnnnnnnnnnnnnnnnnnnnnnnnnnnnnnnnnnnnnnnnnnnnnnnnnnnnnnnnnnnnnnnnnnnnnnnnnnnnnnnnnnnnnnnnnnnnnnnnnnnnnnnnnnnnnnnnnnnnnnnnnnnnnnnnnnnnnnnnnnnnnnnnnnnnnnnnnnnnnnnnnnnnnnnnnnnnnnnnnnnnnnnnnnnnnnnnnnnnnnnnnnnnnnnnnnnnnnnnnnnnnnnnnnnnnnnnnnnnnnnnnnnnnnnnnnnnnnnnnnnnnnnnnnnnnnnnnnnnnnnnnnnnnnnnnnnnnnnnnnnnnnnnnnnnnnnnnnnnnnnnnnnnnnnnnnnnnnnnnnnnnnnnnnnnnnnnnnnnnnnnnnnnnnnnnnnnnnnnnnnnnnnnnnnnnnnnnnnnnnnnnnnnnnnnnnnnnnnnnnnnnnnnnnnnnnnnnnnnnnnnnnnnnnnnnnnnnnnnnnnnnnnnnnnnnnnnnnnnnnnnnnnnnnnnnnnnnnnnnnnnnnnnnnnnnnnnnnnnnnnnnnnnnnnnnnnnnnnnnnnnnnnnnnnnnnnnnnnnnnnnnnnnnnnnnnnnnnnnnnnnnnnnnnnnnnnnnnnnnnnnnnnnnnnnnnnnnnnnnnnnnnnnnnnnnnnnnnnnnnnnnnnnnnnnnnnnnnnnnnnnnnnnnnnnnnnnnnnnnnnnnnnnnnnnnnnnnnnnnnnnnnnnnnnnnnnnnnnnnnnnnnnnnnnnnnnnnnnnnnnnnnnnnnnnnnnnnnnnnnnnnnnnnnnnnnnnnnnnnnnnnnnnnnnnnnnnnnnnnnnnnnnnnnnnnnnnnnnnnnnnnnnnnnnnnnnnnnnnnnnnnnnnnnnnnnnnnnnnnnnnnnnnnnnnnnnnnnnnnnnnnnnnnnnnnnnnnnnnnnnnnnnnnnnnnnnnnnnnnnnnnnnnnnnnnnnnnnnnnnnnnnnnnnnnnnnnnnnnnnnnnnnnnnnnnnnnnnnnnnnnnnnnnnnnnnnnnnnnnnnnnnnnnnnnnnnnnnnnnnnnnnnnnnnnnnnnnnnnnnnnnnnnnnnnnnnnnnnnnnnnnnnnnnnnnnnnnnnnnnnnnnnnnnnnnnnnnnnnnnnnnnnnnnnnnnnnnnnnnnnnnnnnnnnnnnnnnnnnnnnnnnnnnnnnnnnnnnnnnnnnnnnnnnnnnnnnnnnnnnnnnnnnnnnnnnnnnnnnnnnnnnnnnnnnnnnnnnnnnnnnnnnnnnnnnnnnnnnnnnnnnnnnnnnnnnnnnnnnnnnnnnnnnnnnnnnnnnnnnnnnnnnnnnnnnnnnnnnnnnnnnnnnnnnnnnnnnnnnnnnnnnnnnnnnnnnnnnnnnnnnnnnnnnnnnnnnnnnnnnnnnnnnnnnnnnnnnnnnnnnnnnnnnnnnnnnnnnnnnnnnnnnnnnnnnnnnnnnnnnnnnnnnnnnnnnnnnnnnnnnnnnnnnnnnnnnnnnnnnnnnnnnnnnnnnnnnnnnnnnnnnnnnnnnnnnnnnnnnnnnnnnnnnnnnnnnnnnnnnnnnnnnnnnnnnnnnnnnnnnnnnnnnnnnnnnnnnnnnnnnnnnnnnnnnnnnnnnnnnnnnnnnnnnnnnnnnnnnnnnnnnnnnnnnnnnnnnnnnnnnnnnnnnnnnnnnnnnnnnnnnnnnnnnnnnnnnnnnnnnnnnnnnnnnnnnnnnnnnnnnnnnnnnnnnnnnnnnnnnnnnnnnnnnnnnnnnnnnnnnnnnnnnnnnnnnnnnnnnnnnnnnnnnnnnnnnnnnnnnnnnnnnnnnnnnnnnnnnnnnnnnnnnnnnnnnnnnnnnnnnnnnnnnnnnnnnnnnnnnnnnnnnnnnnnnnnnnnnnnnnnnnnnnnnnnnnnnnnnnnnnnnnnnnnnnnnnnnnnnnnnnnnnnnnnnnnnnnnnnnnnnnnnnnnnnnnnnnnnnnnnnnnnnnnnnnnnnnnnnnnnnnnnnnnnnnnnnnnnnnnnnnnnnnnnnnnnnnnnnnnnnnnnnnnnnnnnnnnnnnnnnnnnnnnnnnnnnnnnnnnnnnnnnnnnnnnnnnnnnnnnnnnnnnnnnnnnnnnnnnnnnnnnnnnnnnnnnnnnnnnnnnnnnnnnnnnnnnnnnnnnnnnnnnnnnnnnnnnnnnnnnnnnnnnnnnnnnnnnnnnnnnnnnnnnnnnnnnnnnnnnnnnnnnnnnnnnnnnnnnnnnnnnnnnnnnnnnnnnnnnnnnnnnnnnnnnnnnnnnnnnnnnnnnnnnnnnnnnnnnnnnnnnnnnnnnnnnnnnnnnnnnnnnnnnnnnnnnnnnnnnnnnnnnnnnnnnnnnnnnnnnnnnnnnnnnnnnnnnnnnnnnnnnnnnnnnnnnnnnnnnnnnnnnnnnnnnnnnnnnnnnnnnnnnnnnnnnnnnnnnnnnnnnnnnnnnnnnnnnnnnnnnnnnnnnnnnnnnnnnnnnnnnnnnnnnnnnnnnnnnnnnnnnnnnnnnnnnnnnnnnnnnnnnnnnnnnnnnnnnnnnnnnnnnnnnnnnnnnnnnnnnnnnnnnnnnnnnnnnnnnnnnnnnnnnnnnnnnnnnnnnnnnnnnnnnnnnnnnnnnnnnnnnnnnnnnnnnnnnnnnnnnnnnnnnnnnnnnnnnnnnnnnnnnnnnnnnnnnnnnnnnnnnnnnnnnnnnnnnnnnnnnnnnnnnnnnnnnnnnnnnnnnnnnnnnnnnnnnnnnnnnnnnnnnnnnnnnnnnnnnnnnnnnnnnnnnnnnnnnnnnnnnnnnnnnnnnnnnnnnnnnnnnnnnnnnnnnnnnnnnnnnnnnnnnnnnnnnnnnnnnnnnnnnnnnnnnnnnnnnnnnnnnnnnnnnnnnnnnnnnnnnnnnnnnnnnnnnnnnnnnnnnnnnnnnnnnnnnnnnnnnnnnnnnnnnnnnnnnnnnnnnnnnnnnnnnnnnnnnnnnnnnnnnnnnnnnnnnnnnnnnnnnnnnnnnnnnnnnnnnnnnnnnnnnnnnnnnnnnnnnnnnnnnnnnnnnnnnnnnnnnnnnnnnnnnnnnnnnnnnnnnnnnnnnnnnnnnnnnnnnnnnnnnnnnnnnnnnnnnnnnnnnnnnnnnnnnnnnnnnnnnnnnnnnnnnnnnnnnnnnnnnnnnnnnnnnnnnnnnnnnnnnnnnnnnnnnnnnnnnnnnnnnnnnnnnnnnnnnnnnnnnnnnnnnnnnnnnnnnnnnnnnnnnnnnnnnnnnnnnnnnnnnnnnnnnnnnnnnnnnnnnnnnnnnnnnnnnnnnnnnnnnnnnnnnnnnnnnnnnnnnnnnnnnnnnnnnnnnnnnnnnnnnnnnnnnnnnnnnnnnnnnnnnnnnnnnnnnnnnnnnnnnnnnnnnnnnnnnnnnnnnnnnnnnnnnnnnnnnnnnnnnnnnnnnnnnnnnnnnnnnnnnnnnnnnnnnnnnnnnnnnnnnnnnnnnnnnnnnnnnnnnnnnnnnnnnnnnnnnnnnnnnnnnnnnnnnnnnnnnnnnnnnnnnnnnnnnnnnnnnnnnnnnnnnnnnnnnnnnnnnnnnnnnnnnnnnnnnnnnnnnnnnnnnnnnnnnnnnnnnnnnnnnnnnnnnnnnnnnnnnnnnnnnnnnnnnnnnnnnnnnnnnnnnnnnnnnnnnnnnnnnnnnnnnnnnnnnnnnnnnnnnnnnnnnnnnnnnnnnnnnnnnnnnnnnnnnnnnnnnnnnnnnnnnnnnnnnnnnnnnnnnnnnnnnnnnnnnnnnnnnnnnnnnnnnnnnnnnnnnnnnnnnnnnnnnnnnnnnnnnnnnnnnnnnnnnnnnnnnnnnnnnnnnnnnnnnnnnnnnnnnnnnnnnnnnnnnnnnnnnnnnnnnnnnnnnnnnnnnnnnnnnnnnnnnnnnnnnnnnnnnnnnnnnnnnnnnnnnnnnnnnnnnnnnnnnnnnnnnnnnnnnnnnnnnnnnnnnnnnnnnnnnnnnnnnnnnnnnnnnnnnnnnnnnnnnnnnnnnnnnnnnnnnnnnnnnnnnnnnnnnnnnnnnnnnnnnnnnnnnnnnnnnnnnnnnnnnnnnnnnnnnnnnnnnnnnnnnnnnnnnnnnnnnnnnnnnnnnnnnnnnnnnnnnnnnnnnnnnnnnnnnnnnnnnnnnnnnnnnnnnnnnnnnnnnnnnnnnnnnnnnnnnnnnnnnnnnnnnnnnnnnnnnnnnnnnnnnnnnnnnnnnnnnnnnnnnnnnnnnnnnnnnnnnnnnnnnnnnnnnnnnnnnnnnnnnnnnnnnnnnnnnnnnnnnnnnnnnnnnnnnnnnnnnnnnnnnnnnnnnnnnnnnnnnnnnnnnnnnnnnnnnnnnnnnnnnnnnnnnnnnnnnnnnnnnnnnnnnnnnnnnnnnnnnnnnnnnnnnnnnnnnnnnnnnnnnnnnnnnnnnnnnnnnnnnnnnnnnnnnnnnnnnnnnnnnnnnnnnnnnnnnnnnnnnnnnnnnnnnnnnnnnnnnnnnnnnnnnnnnnnnnnnnnnnnnnnnnnnnnnnnnnnnnnnnnnnnnnnnnnnnnnnnnnnnnnnnnnnnnnnnnnnnnnnnnnnnnnnnnnnnnnnnnnnnnnnnnnnnnnnnnnnnnnnnnnnnnnnnnnnnnnnnnnnnnnnnnnnnnnnnnnnnnnnnnnnnnnnnnnnnnnnnnnnnnnnnnnnnnnnnnnnnnnnnnnnnnnnnnnnnnnnnnnnnnnnnnnnnnnnnnnnnnnnnnnnnnnnnnnnnnnnnnnnnnnnnnnnnnnnnnnnnnnnnnnnnnnnnnnnnnnnnnnnnnnnnnnnnnnnnnnnnnnnnnnnnnnnnnnnnnnnnnnnnnnnnnnnnnnnnnnnnnnnnnnnnnnnnnnnnnnnnnnnnnnnnnnnnnnnnnnnnnnnnnnnnnnnnnnnnnnnnnnnnnnnnnnnnnnnnnnnnnnnnnnnnnnnnnnnnnnnnnnnnnnnnnnnnnnnnnnnnnnnnnnnnnnnnnnnnnnnnnnnnnnnnnnnnnnnnnnnnnnnnnnnnnnnnnnnnnnnnnnnnnnnnnnnnnnnnnnnnnnnnnnnnnnnnnnnnnnnnnnnnnnnnnnnnnnnnnnnnnnnnnnnnnnnnnnnnnnnnnnnnnnnnnnnnnnnnnnnnnnnnnnnnnnnnnnnnnnnnnnnnnnnnnnnnnnnnnnnnnnnnnnnnnnnnnnnnnnnnnnnnnnnnnnnnnnnnnnnnnnnnnnnnnnnnnnnnnnnnnnnnnnnnnnnnnnnnnnnnnnnnnnnnnnnnnnnnnnnnnnnnnnnnnnnnnnnnnnnnnnnnnnnnnnnnnnnnnnnnnnnnnnnnnnnnnnnnnnnnnnnnnnnnnnnnnnnnnnnnnnnnnnnnnnnnnnnnnnnnnnnnnnnnnnnnnnnnnnnnnnnnnnnnnnnnnnnnnnnnnnnnnnnnnnnnnnnnnnnnnnnnnnnnnnnnnnnnnnnnnnnnnnnnnnnnnnnnnnnnnnnnnnnnnnnnnnnnnnnnnnnnnnnnnnnnnnnnnnnnnnnnnnnnnnnnnnnnnnnnnnnnnnnnnnnnnnnnnnnnnnnnnnnnnnnnnnnnnnnnnnnnnnnnnnnnnnnnnnnnnnnnnnnnnnnnnnnnnnnnnnnnnnnnnnnnnnnnnnnnnnnnnnnnnnnnnnnnnnnnnnnnnnnnnnnnnnnnnnnnnnnnnnnnnnnnnnnnnnnnnnnnnnnnnnnnnnnnnnnnnnnnnnnnnnnnnnnnnnnnnnnnnnnnnnnnnnnnnnnnnnnnnnnnnnnnnnnnnnnnnnnnnnnnnnnnnnnnnnnnnnnnnnnnnnnnnnnnnnnnnnnnnnnnnnnnnnnnnnnnnnnnnnnnnnnnnnnnnnnnnnnnnnnnnnnnnnnnnnnnnnnnnnnnnnnnnnnnnnnnnnnnnnnnnnnnnnnnnnnnnnnnnnnnnnnnnnnnnnnnnnnnnnnnnnnnnnnnnnnnnnnnnnnnnnnnnnnnnnnnnnnnnnnnnnnnnnnnnnnnnnnnnnnnnnnnnnnnnnnnnnnnnnnnnnnnnnnnnnnnnnnnnnnnnnnnnnnnnnnnnnnnnnnnnnnnnnnnnnnnnnnnnnnnnnnnnnnnnnnnnnnnnnnnnnnnnnnnnnnnnnnnnnnnnnnnnnnnnnnnnnnnnnnnnnnnnnnnnnnnnnnnnnnnnnnnnnnnnnnnnnnnnnnnnnnnnnnnnnnnnnnnnnnnnnnnnnnnnnnnnnnnnnnnnnnnnnnnnnnnnnnnnnnnnnnnnnnnnnnnnnnnnnnnnnnnnnnnnnnnnnnnnnnnnnnnnnnnnnnnnnnnnnnnnnnnnnnnnnnnnnnnnnnnnnnnnnnnnnnnnnnnnnnnnnnnnnnnnnnnnnnnnnnnnnnnnnnnnnnnnnnnnnnnnnnnnnnnnnnnnnnnnnnnnnnnnnnnnnnnnnnnnnnnnnnnnnnnnnnnnnnnnnnnnnnnnnnnnnnnnnnnnnnnnnnnnnnnnnnnnnnnnnnnnnnnnnnnnnnnnnnnnnnnnnnnnnnnnnnnnnnnnnnnnnnnnnnnnnnnnnnnnnnnnnnnnnnnnnnnnnnnnnnnnnnnnnnnnnnnnnnnnnnnnnnnnnnnnnnnnnnnnnnnnnnnnnnnnnnnnnnnnnnnnnnnnnnnnnnnnnnnnnnnnnnnnnnnnnnnnnnnnnnnnnnnnnnnnnnnnnnnnnnnnnnnnnnnnnnnnnnnnnnnnnnnnnnnnnnnnnnnnnnnnnnnnnnnnnnnnnnnnnnnnnnnnnnnnnnnnnnnnnnnnnnnnnnnnnnnnnnnnnnnnnnnnnnnnnnnnnnnnnnnnnnnnnnnnnnnnnnnnnnnnnnnnnnnnnnnnnnnnnnnnnnnnnnnnnnnnnnnnnnnnnnnnnnnnnnnnnnnnnnnnnnnnnnnnnnnnnnnnnnnnnnnnnnnnnnnnnnnnnnnnnnnnnnnnnnnnnnnnnnnnnnnnnnnnnnnnnnnnnnnnnnnnnnnnnnnnnnnnnnnnnnnnnnnnnnnnnnnnnnnnnnnnnnnnnnnnnnnnnnnnnnnnnnnnnnnnnnnnnnnnnnnnnnnnnnnnnnnnnnnnnnnnnnnnnnnnnnnnnnnnnnnnnnnnnnnnnnnnnnnnnnnnnnnnnnnnnnnnnnnnnnnnnnnnnnnnnnnnnnnnnnnnnnnnnnnnnnnnnnnnnnnnnnnnnnnnnnnnnnnnnnnnnnnnnnnnnnnnnnnnnnnnnnnnnnnnnnnnnnnnnnnnnnnnnnnnnnnnnnnnnnnnnnnnnnnnnnnnnnnnnnnnnnnnnnnnnnnnnnnnnnnnnnnnnnnnnnnnnnnnnnnnnnnnnnnnnnnnnnnnnnnnnnnnnnnnnnnnnnnnnnnnnnnnnnnnnnnnnnnnnnnnnnnnnnnnnnnnnnnnnnnnnnnnnnnnnnnnnnnnnnnnnnnnnnnnnnnnnnnnnnnnnnnnnnnnnnnnnnnnnnnnnnnnnnnnnnnnnnnnnnnnnnnnnnnnnnnnnnnnnnnnnnnnnnnnnnnnnnnnnnnnnnnnnnnnnnnnnnnnnnnnnnnnnnnnnnnnnnnnnnnnnnnnnnnnnnnnnnnnnnnnnnnnnnnnnnnnnnnnnnnnnnnnnnnnnnnnnnnnnnnnnnnnnnnnnnnnnnnnnnnnnnnnnnnnnnnnnnnnnnnnnnnnnnnnnnnnnnnnnnnnnnnnnnnnnnnnnnnnnnnnnnnnnnnnnnnnnnnnnnnnnnnnnnnnnnnnnnnnnnnnnnnnnnnnnnnnnnnnnnnnnnnnnnnnnnnnnnnnnnnnnnnnnnnnnnnnnnnnnnnnnnnnnnnnnnnnnnnnnnnnnnnnnnnnnnnnnnnnnnnnnnnnnnnnnnnnnnnnnnnnnnnnnnnnnnnnnnnnnnnnnnnnnnnnnnnnnnnnnnnnnnnnnnnnnnnnnnnnnnnnnnnnnnnnnnnnnnnnnnnnnnnnnnnnnnnnnnnnnnnnnnnnnnnnnnnnnnnnnnnnnnnnnnnnnnnnnnnnnnnnnnnnnnnnnnnnnnnnnnnnnnnnnnnnnnnnnnnnnnnnnnnnnnnnnnnnnnnnnnnnnnnnnnnnnnnnnnnnnnnnnnnnnnnnnnnnnnnnnnnnnnnnnnnnnnnnnnnnnnnnnnnnnnnnnnnnnnnnnnnnnnnnnnnnnnnnnnnnnnnnnnnnnnnnnnnnnnnnnnnnnnnnnnnnnnnnnnnnnnnnnnnnnnnnnnnnnnnnnnnnnnnnnnnnnnnnnnnnnnnnnnnnnnnnnnnnnnnnnnnnnnnnnnnnnnnnnnnnnnnnnnnnnnnnnnnnnnnnnnnnnnnnnnnnnnnnnnnnnnnnnnnnnnnnnnnnnnnnnnnnnnnnnnnnnnnnnnnnnnnnnnnnnnnnnnnnnnnnnnnnnnnnnnnnnnnnnnnnnnnnnnnnnnnnnnnnnnnnnnnnnnnnnnnnnnnnnnnnnnnnnnnnnnnnnnnnnnnnnnnnnnnnnnnnnnnnnnnnnnnnnnnnnnnnnnnnnnnnnnnnnnnnnnnnnnnnnnnnnnnnnnnnnnnnnnnnnnnnnnnnnnnnnnnnnnnnnnnnnnnnnnnnnnnnnnnnnnnnnnnnnnnnnnnnnnnnnnnnnnnnnnnnnnnnnnnnnnnnnnnnnnnnnnnnnnnnnnnnnnnnnnnnnnnnnnnnnnnnnnnnnnnnnnnnnnnnnnnnnnnnnnnnnnnnnnnnnnnnnnnnnnnnnnnnnnnnnnnnnnnnnnnnnnnnnnnnnnnnnnnnnnnnnnnnnnnnnnnnnnnnnnnnnnnnnnnnnnnnnnnnnnnnnnnnnnnnnnnnnnnnnnnnnnnnnnnnnnnnnnnnnnnnnnnnnnnnnnnnnnnnnnnnnnnnnnnnnnnnnnnnnnnnnnnnnnnnnnnnnnnnnnnnnnnnnnnnnnnnnnnnnnnnnnnnnnnnnnnnnnnnnnnnnnnnnnnnnnnnnnnnnnnnnnnnnnnnnnnnnnnnnnnnnnnnnnnnnnnnnnnnnnnnnnnnnnnnnnnnnnnnnnnnnnnnnnnnnnnnnnnnnnnnnnnnnnnnnnnnnnnnnnnnnnnnnnnnnnnnnnnnnnnnnnnnnnnnnnnnnnnnnnnnnnnnnnnnnnnnnnnnnnnnnnnnnnnnnnnnnnnnnnnnnnnnnnnnnnnnnnnnnnnnnnnnnnnnnnnnnnnnnnnnnnnnnnnnnnnnnnnnnnnnnnnnnnnnnnnnnnnnnnnnnnnnnnnnnnnnnnnnnnnnnnnnnnnnnnnnnnnnnnnnnnnnnnnnnnnnnnnnnnnnnnnnnnnnnnnnnnnnnnnnnnnnnnnnnnnnnnnnnnnnnnnnnnnnnnnnnnnnnnnnnnnnnnnnnnnnnnnnnnnnnnnnnnnnnnnnnnnnnnnnnnnnnnnnnnnnnnnnnnnnnnnnnnnnnnnnnnnnnnnnnnnnnnnnnnnnnnnnnnnnnnnnnnnnnnnnnnnnnnnnnnnnnnnnnnnnnnnnnnnnnnnnnnnnnnnnnnnnnnnnnnnnnnnnnnnnnnnnnnnnnnnnnnnnnnnnnnnnnnnnnnnnnnnnnnnnnnnnnnnnnnnnnnnnnnnnnnnnnnnnnnnnnnnnnnnnnnnnnnnnnnnnnnnnnnnnnnnnnnnnnnnnnnnnnnnnnnnnnnnnnnnnnnnnnnnnnnnnnnnnnnnnnnnnnnnnnnnnnnnnnnnnnnnnnnnnnnnnnnnnnnnnnnnnnnnnnnnnnnnnnnnnnnnnnnnnnnnnnnnnnnnnnnnnnnnnnnnnnnnnnnnnnnnnnnnnnnnnnnnnnnnnnnnnnnnnnnnnnnnnnnnnnnnnnnnnnnnnnnnnnnnnnnnnnnnnnnnnnnnnnnnnnnnnnnnnnnnnnnnnnnnnnnnnnnnnnnnnnnnnnnnnnnnnnnnnnnnnnnnnnnnnnnnnnnnnnnnnnnnnnnnnnnnnnnnnnnnnnnnnnnnnnnnnnnnnnnnnnnnnnnnnnnnnnnnnnnnnnnnnnnnnnnnnnnnnnnnnnnnnnnnnnnnnnnnnnnnnnnnnnnnnnnnnnnnnnnnnnnnnnnnnnnnnnnnnnnnnnnnnnnnnnnnnnnnnnnnnnnnnnnnnnnnnnnnnnnnnnnnnnnnnnnnnnnnnnnnnnnnnnnnnnnnnnnnnnnnnnnnnnnnnnnnnnnnnnnnnnnnnnnnnnnnnnnnnnnnnnnnnnnnnnnnnnnnnnnnnnnnnnnnnnnnnnnnnnnnnnnnnnnnnnnnnnnnnnnnnnnnnnnnnnnnnnnnnnnnnnnnnnnnnnnnnnnnnnnnnnnnnnnnnnnnnnnnnnnnnnnnnnnnnnnnnnnnnnnnnnnnnnnnnnnnnnnnnnnnnnnnnnnnnnnnnnnnnnnnnnnnnnnnnnnnnnnnnnnnnnnnnnnnnnnnnnnnnnnnnnnnnnnnnnnnnnnnnnnnnnnnnnnnnnnnnnnnnnnnnnnnnnnnnnnnnnnnnnnnnnnnnnnnnnnnnnnnnnnnnnnnnnnnnnnnnnnnnnnnnnnnnnnnnnnnnnnnnnnnnnnnnnnnnnnnnnnnnnnnnnnnnnnnnnnnnnnnnnnnnnnnnnnnnnnnnnnnnnnnnnnnnnnnnnnnnnnnnnnnnnnnnnnnnnnnnnnnnnnnnnnnnnnnnnnnnnnnnnnnnnnnnnnnnnnnnnnnnnnnnnnnnnnnnnnnnnnnnnnnnnnnnnnnnnnnnnnnnnnnnnnnnnnnnnnnnnnnnnnnnnnnnnnnnnnnnnnnnnnnnnnnnnnnnnnnnnnnnnnnnnnnnnnnnnnnnnnnnnnnnnnnnnnnnnnnnnnnnnnnnnnnnnnnnnnnnnnnnnnnnnnnnnnnnnnnnnnnnnnnnnnnnnnnnnnnnnnnnnnnnnnnnnnnnnnnnnnnnnnnnnnnnnnnnnnnnnnnnnnnnnnnnnnnnnnnnnnnnnnnnnnnnnnnnnnnnnnnnnnnnnnnnnnnnnnnnnnnnnnnnnnnnnnnnnnnnnnnnnnnnnnnnnnnnnnnnnnnnnnnnnnnnnnnnnnnnnnnnnnnnnnnnnnnnnnnnnnnnnnnnnnnnnnnnnnnnnnnnnnnnnnnnnnnnnnnnnnnnnnnnnnnnnnnnnnnnnnnnnnnnnnnnnnnnnnnnnnnnnnnnnnnnnnnnnnnnnnnnnnnnnnnnnnnnnnnnnnnnnnnnnnnnnnnnnnnnnnnnnnnnnnnnnnnnnnnnnnnnnnnnnnnnnnnnnnnnnnnnnnnnnnnnnnnnnnnnnnnnnnnnnnnnnnnnnnnnnnnnnnnnnnnnnnnnnnnnnnnnnnnnnnnnnnnnnnnnnnnnnnnnnnnnnnnnnnnnnnnnnnnnnnnnnnnnnnnnnnnnnnnnnnnnnnnnnnnnnnnnnnnnnnnnnnnnnnnnnnnnnnnnnnnnnnnnnnnnnnnnnnnnnnnnnnnnnnnnnnnnnnnnnnnnnnnnnnnnnnnnnnnnnnnnnnnnnnnnnnnnnnnnnnnnnnnnnnnnnnnnnnnnnnnnnnnnnnnnnnnnnnnnnnnnnnnnnnnnnnnnnnnnnnnnnnnnnnnnnnnnnnnnnnnnnnnnnnnnnnnnnnnnnnnnnnnnnnnnnnnnnnnnnnnnnnnnnnnnnnnnnnnnnnnnnnnnnnnnnnnnnnnnnnnnnnnnnnnnnnnnnnnnnnnnnnnnnnnnnnnnnnnnnnnnnnnnnnnnnnnnnnnnnnnnnnnnnnnnnnnnnnnnnnnnnnnnnnnnnnnnnnnnnnnnnnnnnnnnnnnnnnnnnnnnnnnnnnnnnnnnnnnnnnnnnnnnnnnnnnnnnnnnnnnnnnnnnnnnnnnnnnnnnnnnnnnnnnnnnnnnnnnnnnnnnnnnnnnnnnnnnnnnnnnnnnnnnnnnnnnnnnnnnnnnnnnnnnnnnnnnnnnnnnnnnnnnnnnnnnnnnnnnnnnnnnnnnnnnnnnnnnnnnnnnnnnnnnnnnnnnnnnnnnnnnnnnnnnnnnnnnnnnnnnnnnnnnnnnnnnnnnnnnnnnnnnnnnnnnnnnnnnnnnnnnnnnnnnnnnnnnnnnnnnnnnnnnnnnnnnnnnnnnnnnnnnnnnnnnnnnnnnnnnnnnnnnnnnnnnnnnnnnnnnnnnnnnnnnnnnnnnnnnnnnnnnnnnnnnnnnnnnnnnnnnnnnnnnnnnnnnnnnnnnnnnnnnnnnnnnnnnnnnnnnnnnnnnnnnnnnnnnnnnnnnnnnnnnnnnnnnnnnnnnnnnnnnnnnnnnnnnnnnnnnnnnnnnnnnnnnnnnnnnnnnnnnnnnnnnnnnnnnnnnnnnnnnnnnnnnnnnnnnnnnnnnnnnnnnnnnnnnnnnnnnnnnnnnnnnnnnnnnnnnnnnnnnnnnnnnnnnnnnnnnnnnnnnnnnnnnnnnnnnnnnnnnnnnnnnnnnnnnnnnnnnnnnnnnnnnnnnnnnnnnnnnnnnnnnnnnnnnnnnnnnnnnnnnnnnnnnnnnnnnnnnnnnnnnnnnnnnnnnnnnnnnnnnnnnnnnnnnnnnnnnnnnnnnnnnnnnnnnnnnnnnnnnnnnnnnnnnnnnnnnnnnnnnnnnnnnnnnnnnnnnnnnnnnnnnnnnnnnnnnnnnnnnnnnnnnnnnnnnnnnnnnnnnnnnnnnnnnnnnnnnnnnnnnnnnnnnnnnnnnnnnnnnnnnnnnnnnnnnnnnnnnnnnnnnnnnnnnnnnnnnnnnnnnnnnnnnnnnnnnnnnnnnnnnnnnnnnnnnnnnnnnnnnnnnnnnnnnnnnnnnnnnnnnnnnnnnnnnnnnnnnnnnnnnnnnnnnnnnnnnnnnnnnnnnnnnnnnnnnnnnnnnnnnnnnnnnnnnnnnnnnnnnnnnnnnnnnnnnnnnnnnnnnnnnnnnnnnnnnnnnnnnnnnnnnnnnnnnnnnnnnnnnnnnnnnnnnnnnnnnnnnnnnnnnnnnnnnnnnnnnnnnnnnnnnnnnnnnnnnnnnnnnnnnnnnnnnnnnnnnnnnnnnnnnnnnnnnnnnnnnnnnnnnnnnnnnnnnnnnnnnnnnnnnnnnnnnnnnnnnnnnnnnnnnnnnnnnnnnnnnnnnnnnnnnnnnnnnnnnnnnnnnnnnnnnnnnnnnnnnnnnnnnnnnnnnnnnnnnnnnnnnnnnnnnnnnnnnnnnnnnnnnnnnnnnnnnnnnnnnnnnnnnnnnnnnnnnnnnnnnnnnnnnnnnnnnnnnnnnnnnnnnnnnnnnnnnnnnnnnnnnnnnnnnnnnnnnnnnnnnnnnnnnnnnnnnnnnnnnnnnnnnnnnnnnnnnnnnnnnnnnnnnnnnnnnnnnnnnnnnnnnnnnnnnnnnnnnnnnnnnnnnnnnnnnnnnnnnnnnnnnnnnnnnnnnnnnnnnnnnnnnnnnnnnnnnnnnnnnnnnnnnnnnnnnnnnnnnnnnnnnnnnnnnnnnnnnnnnnnnnnnnnnnnnnnnnnnnnnnnnnnnnnnnnnnnnnnnnnnnnnnnnnnnnnnnnnnnnnnnnnnnnnnnnnnnnnnnnnnnnnnnnnnnnnnnnnnnnnnnnnnnnnnnnnnnnnnnnnnnnnnnnnnnnnnnnnnnnnnnnnnnnnnnnnnnnnnnnnnnnnnnnnnnnnnnnnnnnnnnnnnnnnnnnnnnnnnnnnnnnnnnnnnnnnnnnnnnnnnnnnnnnnnnnnnnnnnnnnnnnnnnnnnnnnnnnnnnnnnnnnnnnnnnnnnnnnnnnnnnnnnnnnnnnnnnnnnnnnnnnnnnnnnnnnnnnnnnnnnnnnnnnnnnnnnnnnnnnnnnnnnnnnnnnnnnnnnnnnnnnnnnnnnnnnnnnnnnnnnnnnnnnnnnnnnnnnnnnnnnnnnnnnnnnnnnnnnnnnnnnnnnnnnnnnnnnnnnnnnnnnnnnnnnnnnnnnnnnnnnnnnnnnnnnnnnnnnnnnnnnnnnnnnnnnnnnnnnnnnnnnnnnnnnnnnnnnnnnnnnnnnnnnnnnnnnnnnnnnnnnnnnnnnnnnnnnnnnnnnnnnnnnnnnnnnnnnnnnnnnnnnnnnnnnnnnnnnnnnnnnnnnnnnnnnnnnnnnnnnnnnnnnnnnnnnnnnnnnnnnnnnnnnnnnnnnnnnnnnnnnnnnnnnnnnnnnnnnnnnnnnnnnnnnnnnnnnnnnnnnnnnnnnnnnnnnnnnnnnnnnnnnnnnnnnnnnnnnnnnnnnnnnnnnnnnnnnnnnnnnnnnnnnnnnnnnnnnnnnnnnnnnnnnnnnnnnnnnnnnnnnnnnnnnnnnnnnnnnnnnnnnnnnnnnnnnnnnnnnnnnnnnnnnnnnnnnnnnnnnnnnnnnnnnnnnnnnnnnnnnnnnnnnnnnnnnnnnnnnnnnnnnnnnnnnnnnnnnnnnnnnnnnnnnnnnnnnnnnnnnnnnnnnnnnnnnnnnnnnnnnnnnnnnnnnnnnnnnnnnnnnnnnnnnnnnnnnnnnnnnnnnnnnnnnnnnnnnnnnnnnnnnnnnnnnnnnnnnnnnnnnnnnnnnnnnnnnnnnnnnnnnnnnnnnnnnnnnnnnnnnnnnnnnnnnnnnnnnnnnnnnnnnnnnnnnnnnnnnnnnnnnnnnnnnnnnnnnnnnnnnnnnnnnnnnnnnnnnnnnnnnnnnnnnnnnnnnnnnnnnnnnnnnnnnnnnnnnnnnnnnnnnnnnnnnnnnnnnnnnnnnnnnnnnnnnnnnnnnnnnnnnnnnnnnnnnnnnnnnnnnnnnnnnnnnnnnnnnnnnnnnnnnnnnnnnnnnnnnnnnnnnnnnnnnnnnnnnnnnnnnnnnnnnnnnnnnnnnnnnnnnnnnnnnnnnnnnnnnnnnnnnnnnnnnnnnnnnnnnnnnnnnnnnnnnnnnnnnnnnnnnnnnnnnnnnnnnnnnnnnnnnnnnnnnnnnnnnnnnnnnnnnnnnnnnnnnnnnnnnnnnnnnnnnnnnnnnnnnnnnnnnnnnnnnnnnnnnnnnnnnnnnnnnnnnnnnnnnnnnnnnnnnnnnnnnnnnnnnnnnnnnnnnnnnnnnnnnnnnnnnnnnnnnnnnnnnnnnnnnnnnnnnnnnnnnnnnnnnnnnnnnnnnnnnnnnnnnnnnnnnnnnnnnnnnnnnnnnnnnnnnnnnnnnnnnnnnnnnnnnnnnnnnnnnnnnnnnnnnnnnnnnnnnnnnnnnnnnnnnnnnnnnnnnnnnnnnnnnnnnnnnnnnnnnnnnnnnnnnnnnnnnnnnnnnnnnnnnnnnnnnnnnnnnnnnnnnnnnnnnnnnnnnnnnnnnnnnnnnnnnnnnnnnnnnnnnnnnnnnnnnnnnnnnnnnnnnnnnnnnnnnnnnnnnnnnnnnnnnnnnnnnnnnnnnnnnnnnnnnnnnnnnnnnnnnnnnnnnnnnnnnnnnnnnnnnnnnnnnnnnnnnnnnnnnnnnnnnnnnnnnnnnnnnnnnnnnnnnnnnnnnnnnnnnnnnnnnnnnnnnnnnnnnnnnnnnnnnnnnnnnnnnnnnnnnnnnnnnnnnnnnnnnnnnnnnnnnnnnnnnnnnnnnnnnnnnnnnnnnnnnnnnnnnnnnnnnnnnnnnnnnnnnnnnnnnnnnnnnnnnnnnnnnnnnnnnnnnnnnnnnnnnnnnnnnnnnnnnnnnnnnnnnnnnnnnnnnnnnnnnnnnnnnnnnnnnnnnnnnnnnnnnnnnnnnnnnnnnnnnnnnnnnnnnnnnnnnnnnnnnnnnnnnnnnnnnnnnnnnnnnnnnnnnnnnnnnnnnnnnnnnnnnnnnnnnnnnnnnnnnnnnnnnnnnnnnnnnnnnnnnnnnnnnnnnnnnnnnnnnnnnnnnnnnnnnnnnnnnnnnnnnnnnnnnnnnnnnnnnnnnnnnnnnnnnnnnnnnnnnnnnnnnnnnnnnnnnnnnnnnnnnnnnnnnnnnnnnnnnnnnnnnnnnnnnnnnnnnnnnnnnnnnnnnnnnnnnnnnnnnnnnnnnnnnnnnnnnnnnnnnnnnnnnnnnnnnnnnnnnnnnnnnnnnnnnnnnnnnnnnnnnnnnnnnnnnnnnnnnnnnnnnnnnnnnnnnnnnnnnnnnnnnnnnnnnnnnnnnnnnnnnnnnnnnnnnnnnnnnnnnnnnnnnnnnnnnnnnnnnnnnnnnnnnnnnnnnnnnnnnnnnnnnnnnnnnnnnnnnnnnnnnnnnnnnnnnnnnnnnnnnnnnnnnnnnnnnnnnnnnnnnnnnnnnnnnnnnnnnnnnnnnnnnnnnnnnnnnnnnnnnnnnnnnnnnnnnnnnnnnnnnnnnnnnnnnnnnnnnnnnnnnnnnnnnnnnnnnnnnnnnnnnnnnnnnnnnnnnnnnnnnnnnnnnnnnnnnnnnnnnnnnnnnnnnnnnnnnnnnnnnnnnnnnnnnnnnnnnnnnnnnnnnnnnnnnnnnnnnnnnnnnnnnnnnnnnnnnnnnnnnnnnnnnnnnnnnnnnnnnnnnnnnnnnnnnnnnnnnnnnnnnnnnnnnnnnnnnnnnnnnnnnnnnnnnnnnnnnnnnnnnnnnnnnnnnnnnnnnnnnnnnnnnnnnnnnnnnnnnnnnnnnnnnnnnnnnnnnnnnnnnnnnnnnnnnnnnnnnnnnnnnnnnnnnnnnnnnnnnnnnnnnnnnnnnnnnnnnnnnnnnnnnnnnnnnnnnnnnnnnnnnnnnnnnnnnnnnnnnnnnnnnnnnnnnnnnnnnnnnnnnnnnnnnnnnnnnnnnnnnnnnnnnnnnnnnnnnnnnnnnnnnnnnnnnnnnnnnnnnnnnnnnnnnnnnnnnnnnnnnnnnnnnnnnnnnnnnnnnnnnnnnnnnnnnnnnnnnnnnnnnnnnnnnnnnnnnnnnnnnnnnnnnnnnnnnnnnnnnnnnnnnnnnnnnnnnnnnnnnnnnnnnnnnnnnnnnnnnnnnnnnnnnnnnnnnnnnnnnnnnnnnnnnnnnnnnnnnnnnnnnnnnnnnnnnnnnnnnnnnnnnnnnnnnnnnnnnnnnnnnnnnnnnnnnnnnnnnnnnnnnnnnnnnnnnnnnnnnnnnnnnnnnnnnnnnnnnnnnnnnnnnnnnnnnnnnnnnnnnnnnnnnnnnnnnnnnnnnnnnnnnnnnnnnnnnnnnnnnnnnnnnnnnnnnnnnnnnnnnnnnnnnnnnnnnnnnnnnnnnnnnnnnnnnnnnnnnnnnnnnnnnnnnnnnnnnnnnnnnnnnnnnnnnnnnnnnnnnnnnnnnnnnnnnnnnnnnnnnnnnnnnnnnnnnnnnnnnnnnnnnnnnnnnnnnnnnnnnnnnnnnnnnnnnnnnnnnnnnnnnnnnnnnnnnnnnnnnnnnnnnnnnnnnnnnnnnnnnnnnnnnnnnnnnnnnnnnnnnnnnnnnnnnnnnnnnnnnnnnnnnnnnnnnnnnnnnnnnnnnnnnnnnnnnnnnnnnnnnnnnnnnnnnnnnnnnnnnnnnnnnnnnnnnnnnnnnnnnnnnnnnnnnnnnnnnnnnnnnnnnnnnnnnnnnnnnnnnnnnnnnnnnnnnnnnnnnnnnnnnnnnnnnnnnnnnnnnnnnnnnnnnnnnnnnnnnnnnnnnnnnnnnnnnnnnnnnnnnnnnnnnnnnnnnnnnnnnnnnnnnnnnnnnnnnnnnnnnnnnnnnnnnnnnnnnnnnnnnnnnnnnnnnnnnnnnnnnnnnnnnnnnnnnnnnnnnnnnnnnnnnnnnnnnnnnnnnnnnnnnnnnnnnnnnnnnnnnnnnnnnnnnnnnnnnnnnnnnnnnnnnnnnnnnnnnnnnnnnnnnnnnnnnnnnnnnnnnnnnnnnnnnnnnnnnnnnnnnnnnnnnnnnnnnnnnnnnnnnnnnnnnnnnnnnnnnnnnnnnnnnnnnnnnnnnnnnnnnnnnnnnnnnnnnnnnnnnnnnnnnnnnnnnnnnnnnnnnnnnnnnnnnnnnnnnnnnnnnnnnnnnnnnnnnnnnnnnnnnnnnnnnnnnnnnnnnnnnnnnnnnnnnnnnnnnnnnnnnnnnnnnnnnnnnnnnnnnnnnnnnnnnnnnnnnnnnnnnnnnnnnnnnnnnnnnnnnnnnnnnnnnnnnnnnnnnnnnnnnnnnnnnnnnnnnnnnnnnnnnnnnnnnnnnnnnnnnnnnnnnnnnnnnnnnnnnnnnnnnnnnnnnnnnnnnnnnnnnnnnnnnnnnnnnnnnnnnnnnnnnnnnnnnnnnnnnnnnnnnnnnnnnnnnnnnnnnnnnnnnnnnnnnnnnnnnnnnnnnnnnnnnnnnnnnnnnnnnnnnnnnnnnnnnnnnnnnnnnnnnnnnnnnnnnnnnnnnnnnnnnnnnnnnnnnnnnnnnnnnnnnnnnnnnnnnnnnnnnnnnnnnnnnnnnnnnnnnnnnnnnnnnnnnnnnnnnnnnnnnnnnnnnnnnnnnnnnnnnnnnnnnnnnnnnnnnnnnnnnnnnnnnnnnnnnnnnnnnnnnnnnnnnnnnnnnnnnnnnnnnnnnnnnnnnnnnnnnnnnnnnnnnnnnnnnnnnnnnnnnnnnnnnnnnnnnnnnnnnnnnnnnnnnnnnnnnnnnnnnnnnnnnnnnnnnnnnnnnnnnnnnnnnnnnnnnnnnnnnnnnnnnnnnnnnnnnnnnnnnnnnnnnnnnnnnnnnnnnnnnnnnnnnnnnnnnnnnnnnnnnnnnnnnnnnnnnnnnnnnnnnnnnnnnnnnnnnnnnnnnnnnnnnnnnnnnnnnnnnnnnnnnnnnnnnnnnnnnnnnnnnnnnnnnnnnnnnnnnnnnnnnnnnnnnnnnnnnnnnnnnnnnnnnnnnnnnnnnnnnnnnnnnnnnnnnnnnnnnnnnnnnnnnnnnnnnnnnnnnnnnnnnnnnnnnnnnnnnnnnnnnnnnnnnnnnnnnnnnnnnnnnnnnnnnnnnnnnnnnnnnnnnnnnnnnnnnnnnnnnnnnnnnnnnnnnnnnnnnnnnnnnnnnnnnnnnnnnnnnnnnnnnnnnnnnnnnnnnnnnnnnnnnnnnnnnnnnnnnnnnnnnnnnnnnnnnnnnnnnnnnnnnnnnnnnnnnnnnnnnnnnnnnnnnnnnnnnnnnnnnnnnnnnnnnnnnnnnnnnnnnnnnnnnnnnnnnnnnnnnnnnnnnnnnnnnnnnnnnnnnnnnnnnnnnnnnnnnnnnnnnnnnnnnnnnnnnnnnnnnnnnnnnnnnnnnnnnnnnnnnnnnnnnnnnnnnnnnnnnnnnnnnnnnnnnnnnnnnnnnnnnnnnnnnnnnnnnnnnnnnnnnnnnnnnnnnnnnnnnnnnnnnnnnnnnnnnnnnnnnnnnnnnnnnnnnnnnnnnnnnnnnnnnnnnnnnnnnnnnnnnnnnnnnnnnnnnnnnnnnnnnnnnnnnnnnnnnnnnnnnnnnnnnnnnnnnnnnnnnnnnnnnnnnnnnnnnnnnnnnnnnnnnnnnnnnnnnnnnnnnnnnnnnnnnnnnnnnnnnnnnnnnnnnnnnnnnnnnnnnnnnnnnnnnnnnnnnnnnnnnnnnnnnnnnnnnnnnnnnnnnnnnnnnnnnnnnnnnnnnnnnnnnnnnnnnnnnnnnnnnnnnnnnnnnnnnnnnnnnnnnnnnnnnnnnnnnnnnnnnnnnnnnnnnnnnnnnnnnnnnnnnnnnnnnnnnnnnnnnnnnnnnnnnnnnnnnnnnnnnnnnnnnnnnnnnnnnnnnnnnnnnnnnnnnnnnnnnnnnnnnnnnnnnnnnnnnnnnnnnnnnnnnnnnnnnnnnnnnnnnnnnnnnnnnnnnnnnnnnnnnnnnnnnnnnnnnnnnnnnnnnnnnnnnnnnnnnnnnnnnnnnnnnnnnnnnnnnnnnnnnnnnnnnnnnnnnnnnnnnnnnnnnnnnnnnnnnnnnnnnnnnnnnnnnnnnnnnnnnnnnnnnnnnnnnnnnnnnnnnnnnnnnnnnnnnnnnnnnnnnnnnnnnnnnnnnnnnnnnnnnnnnnnnnnnnnnnnnnnnnnnnnnnnnnnnnnnnnnnnnnnnnnnnnnnnnnnnnnnnnnnnnnnnnnnnnnnnnnnnnnnnnnnnnnnnnnnnnnnnnnnnnnnnnnnnnnnnnnnnnnnnnnnnnnnnnnnnnnnnnnnnnnnnnnnnnnnnnnnnnnnnnnnnnnnnnnnnnnnnnnnnnnnnnnnnnnnnnnnnnnnnnnnnnnnnnnnnnnnnnnnnnnnnnnnnnnnnnnnnnnnnnnnnnnnnnnnnnnnnnnnnnnnnnnnnnnnnnnnnnnnnnnnnnnnnnnnnnnnnnnnnnnnnnnnnnnnnnnnnnnnnnnnnnnnnnnnnnnnnnnnnnnnnnnnnnnnnnnnnnnnnnnnnnnnnnnnnnnnnnnnnnnnnnnnnnnnnnnnnnnnnnnnnnnnnnnnnnnnnnnnnnnnnnnnnnnnnnnnnnnnnnnnnnnnnnnnnnnnnnnnnnnnnnnnnnnnnnnnnnnnnnnnnnnnnnnnnnnnnnnnnnnnnnnnnnnnnnnnnnnnnnnnnnnnnnnnnnnnnnnnnnnnnnnnnnnnnnnnnnnnnnnnnnnnnnnnnnnnnnnnnnnnnnnnnnnnnnnnnnnnnnnnnnnnnnnnnnnnnnnnnnnnnnnnnnnnnnnnnnnnnnnnnnnnnnnnnnnnnnnnnnnnnnnnnnnnnnnnnnnnnnnnnnnnnnnnnnnnnnnnnnnnnnnnnnnnnnnnnnnnnnnnnnnnnnnnnnnnnnnnnnnnnnnnnnnnnnnnnnnnnnnnnnnnnnnnnnnnnnnnnnnnnnnnnnnnnnnnnnnnnnnnnnnnnnnnnnnnnnnnnnnnnnnnnnnnnnnnnnnnnnnnnnnnnnnnnnnnnnnnnnnnnnnnnnnnnnnnnnnnnnnnnnnnnnnnnnnnnnnnnnnnnnnnnnnnnnnnnnnnnnnnnnnnnnnnnnnnnnnnnnnnnnnnnnnnnnnnnnnnnnnnnnnnnnnnnnnnnnnnnnnnnnnnnnnnnnnnnnnnnnnnnnnnnnnnnnnnnnnnnnnnnnnnnnnnnnnnnnnnnnnnnnnnnnnnnnnnnnnnnnnnnnnnnnnnnnnnnnnnnnnnnnnnnnnnnnnnnnnnnnnnnnnnnnnnnnnnnnnnnnnnnnnnnnnnnnnnnnnnnnnnnnnnnnnnnnnnnnnnnnnnnnnnnnnnnnnnnnnnnnnnnnnnnnnnnnnnnnnnnnnnnnnnnnnnnnnnnnnnnnnnnnnnnnnnnnnnnnnnnnnnnnnnnnnnnnnnnnnnnnnnnnnnnnnnnnnnnnnnnnnnnnnnnnnnnnnnnnnnnnnnnnnnnnnnnnnnnnnnnnnnnnnnnnnnnnnnnnnnnnnnnnnnnnnnnnnnnnnnnnnnnnnnnnnnnnnnnnnnnnnnnnnnnnnnnnnnnnnnnnnnnnnnnnnnnnnnnnnnnnnnnnnnnnnnnnnnnnnnnnnnnnnnnnnnnnnnnnnnnnnnnnnnnnnnnnnnnnnnnnnnnnnnnnnnnnnnnnnnnnnnnnnnnnnnnnnnnnnnnnnnnnnnnnnnnnnnnnnnnnnnnnnnnnnnnnnnnnnnnnnnnnnnnnnnnnnnnnnnnnnnnnnnnnnnnnnnnnnnnnnnnnnnnnnnnnnnnnnnnnnnnnnnnnnnnnnnnnnnnnnnnnnnnnnnnnnnnnnnnnnnnnnnnnnnnnnnnnnnnnnnnnnnnnnnnnnnnnnnnnnnnnnnnnnnnnnnnnnnnnnnnnnnnnnnnnnnnnnnnnnnnnnnnnnnnnnnnnnnnnnnnnnnnnnnnnnnnnnnnnnnnnnnnnnnnnnnnnnnnnnnnnnnnnnnnnnnnnnnnnnnnnnnnnnnnnnnnnnnnnnnnnnnnnnnnnnnnnnnnnnnnnnnnnnnnnnnnnnnnnnnnnnnnnnnnnnnnnnnnnnnnnnnnnnnnnnnnnnnnnnnnnnnnnnnnnnnnnnnnnnnnnnnnnnnnnnnnnnnnnnnnnnnnnnnnnnnnnnnnnnnnnnnnnnnnnnnnnnnnnnnnnnnnnnnnnnnnnnnnnnnnnnnnnnnnnnnnnnnnnnnnnnnnnnnnnnnnnnnnnnnnnnnnnnnnnnnnnnnnnnnnnnnnnnnnnnnnnnnnnnnnnnnnnnnnnnnnnnnnnnnnnnnnnnnnnnnnnnnnnnnnnnnnnnnnnnnnnnnnnnnnnnnnnnnnnnnnnnnnnnnnnnnnnnnnnnnnnnnnnnnnnnnnnnnnnnnnnnnnnnnnnnnnnnnnnnnnnnnnnnnnnnnnnnnnnnnnnnnnnnnnnnnnnnnnnnnnnnnnnnnnnnnnnnnnnnnnnnnnnnnnnnnnnnnnnnnnnnnnnnnnnnnnnnnnnnnnnnnnnnnnnnnnnnnnnnnnnnnnnnnnnnnnnnnnnnnnnnnnnnnnnnnnnnnnnnnnnnnnnnnnnnnnnnnnnnnnnnnnnnnnnnnnnnnnnnnnnnnnnnnnnnnnnnnnnnnnnnnnnnnnnnnnnnnnnnnnnnnnnnnnnnnnnnnnnnnnnnnnnnnnnnnnnnnnnnnnnnnnnnnnnnnnnnnnnnnnnnnnnnnnnnnnnnnnnnnnnnnnnnnnnnnnnnnnnnnnnnnnnnnnnnnnnnnnnnnnnnnnnnnnnnnnnnnnnnnnnnnnnnnnnnnnnnnnnnnnnnnnnnnnnnnnnnnnnnnnnnnnnnnnnnnnnnnnnnnnnnnnnnnnnnnnnnnnnnnnnnnnnnnnnnnnnnnnnnnnnnnnnnnnnnnnnnnnnnnnnnnnnnnnnnnnnnnnnnnnnnnnnnnnnnnnnnnnnnnnnnnnnnnnnnnnnnnnnnnnnnnnnnnnnnnnnnnnnnnnnnnnnnnnnnnnnnnnnnnnnnnnnnnnnnnnnnnnnnnnnnnnnnnnnnnnnnnnnnnnnnnnnnnnnnnnnnnnnnnnnnnnnnnnnnnnnnnnnnnnnnnnnnnnnnnnnnnnnnnnnnnnnnnnnnnnnnnnnnnnnnnnnnnnnnnnnnnnnnnnnnnnnnnnnnnnnnnnnnnnnnnnnnnnnnnnnnnnnnnnnnnnnnnnnnnnnnnnnnnnnnnnnnnnnnnnnnnnnnnnnnnnnnnnnnnnnnnnnnnnnnnnnnnnnnnnnnnnnnnnnnnnnnnnnnnnnnnnnnnnnnnnnnnnnnnnnnnnnnnnnnnnnnnnnnnnnnnnnnnnnnnnnnnnnnnnnnnnnnnnnnnnnnnnnnnnnnnnnnnnnnnnnnnnnnnnnnnnnnnnnnnnnnnnnnnnnnnnnnnnnnnnnnnnnnnnnnnnnnnnnnnnnnnnnnnnnnnnnnnnnnnnnnnnnnnnnnnnnnnnnnnnnnnnnnnnnnnnnnnnnnnnnnnnnnnnnnnnnnnnnnnnnnnnnnnnnnnnnnnnnnnnnnnnnnnnnnnnnnnnnnnnnnnnnnnnnnnnnnnnnnnnnnnnnnnnnnnnnnnnnnnnnnnnnnnnnnnnnnnnnnnnnnnnnnnnnnnnnnnnnnnnnnnnnnnnnnnnnnnnnnnnnnnnnnnnnnnnnnnnnnnnnnnnnnnnnnnnnnnnnnnnnnnnnnnnnnnnnnnnnnnnnnnnnnnnnnnnnnnnnnnnnnnnnnnnnnnnnnnnnnnnnnnnnnnnnnnnnnnnnnnnnnnnnnnnnnnnnnnnnnnnnnnnnnnnnnnnnnnnnnnnnnnnnnnnnnnnnnnnnnnnnnnnnnnnnnnnnnnnnnnnnnnnnnnnnnnnnnnnnnnnnnnnnnnnnnnnnnnnnnnnnnnnnnnnnnnnnnnnnnnnnnnnnnnnnnnnnnnnnnnnnnnnnnnnnnnnnnnnnnnnnnnnnnnnnnnnnnnnnnnnnnnnnnnnnnnnnnnnnnnnnnnnnnnnnnnnnnnnnnnnnnnnnnnnnnnnnnnnnnnnnnnnnnnnnnnnnnnnnnnnnnnnnnnnnnnnnnnnnnnnnnnnnnnnnnnnnnnnnnnnnnnnnnnnnnnnnnnnnnnnnnnnnnnnnnnnnnnnnnnnnnnnnnnnnnnnnnnnnnnnnnnnnnnnnnnnnnnnnnnnnnnnnnnnnnnnnnnnnnnnnnnnnnnnnnnnnnnnnnnnnnnnnnnnnnnnnnnnnnnnnnnnnnnnnnnnnnnnnnnnnnnnnnnnnnnnnnnnnnnnnnnnnnnnnnnnnnnnnnnnnnnnnnnnnnnnnnnnnnnnnnnnnnnnnnnnnnnnnnnnnnnnnnnnnnnnnnnnnnnnnnnnnnnnnnnnnnnnnnnnnnnnnnnnnnnnnnnnnnnnnnnnnnnnnnnnnnnnnnnnnnnnnnnnnnnnnnnnnnnnnnnnnnnnnnnnnnnnnnnnnnnnnnnnnnnnnnnnnnnnnnnnnnnnnnnnnnnnnnnnnnnnnnnnnnnnnnnnnnnnnnnnnnnnnnnnnnnnnnnnnnnnnnnnnnnnnnnnnnnnnnnnnnnnnnnnnnnnnnnnnnnnnnnnnnnnnnnnnnnnnnnnnnnnnnnnnnnnnnnnnnnnnnnnnnnnnnnnnnnnnnnnnnnnnnnnnnnnnnnnnnnnnnnnnnnnnnnnnnnnnnnnnnnnnnnnnnnnnnnnnnnnnnnnnnnnnnnnnnnnnnnnnnnnnnnnnnnnnnnnnnnnnnnnnnnnnnnnnnnnnnnnnnnnnnnnnnnnnnnnnnnnnnnnnnnnnnnnnnnnnnnnnnnnnnnnnnnnnnnnnnnnnnnnnnnnnnnnnnnnnnnnnnnnnnnnnnnnnnnnnnnnnnnnnnnnnnnnnnnnnnnnnnnnnnnnnnnnnnnnnnnnnnnnnnnnnnnnnnnnnnnnnnnnnnnnnnnnnnnnnnnnnnnnnnnnnnnnnnnnnnnnnnnnnnnnnnnnnnnnnnnnnnnnnnnnnnnnnnnnnnnnnnnnnnnnnnnnnnnnnnnnnnnnnnnnnnnnnnnnnnnnnnnnnnnnnnnnnnnnnnnnnnnnnnnnnnnnnnnnnnnnnnnnnnnnnnnnnnnnnnnnnnnnnnnnnnnnnnnnnnnnnnnnnnnnnnnnnnnnnnnnnnnnnnnnnnnnnnnnnnnnnnnnnnnnnnnnnnnnnnnnnnnnnnnnnnnnnnnnnnnnnnnnnnnnnnnnnnnnnnnnnnnnnnnnnnnnnnnnnnnnnnnnnnnnnnnnnnnnnnnnnnnnnnnnnnnnnnnnnnnnnnnnnnnnnnnnnnnnnnnnnnnnnnnnnnnnnnnnnnnnnnnnnnnnnnnnnnnnnnnnnnnnnnnnnnnnnnnnnnnnnnnnnnnnnnnnnnnnnnnnnnnnnnnnnnnnnnnnnnnnnnnnnnnnnnnnnnnnnnnnnnnnnnnnnnnnnnnnnnnnnnnnnnnnnnnnnnnnnnnnnnnnnnnnnnnnnnnnnnnnnnnnnnnnnnnnnnnnnnnnnnnnnnnnnnnnnnnnnnnnnnnnnnnnnnnnnnnnnnnnnnnnnnnnnnnnnnnnnnnnnnnnnnnnnnnnnnnnnnnnnnnnnnnnnnnnnnnnnnnnnnnnnnnnnnnnnnnnnnnnnnnnnnnnnnnnnnnnnnnnnnnnnnnnnnnnnnnnnnnnnnnnnnnnnnnnnnnnnnnnnnnnnnnnnnnnnnnnnnnnnnnnnnnnnnnnnnnnnnnnnnnnnnnnnnnnnnnnnnnnnnnnnnnnnnnnnnnnnnnnnnnnnnnnnnnnnnnnnnnnnnnnnnnnnnnnnnnnnnnnnnnnnnnnnnnnnnnnnnnnnnnnnnnnnnnnnnnnnnnnnnnnnnnnnnnnnnnnnnnnnnnnnnnnnnnnnnnnnnnnnnnnnnnnnnnnnnnnnnnnnnnnnnnnnnnnnnnnnnnnnnnnnnnnnnnnnnnnnnnnnnnnnnnnnnnnnnnnnnnnnnnnnnnnnnnnnnnnnnnnnnnnnnnnnnnnnnnnnnnnnnnnnnnnnnnnnnnnnnnnnnnnnnnnnnnnnnnnnnnnnnnnnnnnnnnnnnnnnnnnnnnnnnnnnnnnnnnnnnnnnnnnnnnnnnnnnnnnnnnnnnnnnnnnnnnnnnnnnnnnnnnnnnnnnnnnnnnnnnnnnnnnnnnnnnnnnnnnnnnnnnnnnnnnnnnnnnnnnnnnnnnnnnnnnnnnnnnnnnnnnnnnnnnnnnnnnnnnnnnnnnnnnnnnnnnnnnnnnnnnnnnnnnnnnnnnnnnnnnnnnnnnnnnnnnnnnnnnnnnnnnnnnnnnnnnnnnnnnnnnnnnnnnnnnnnnnnnnnnnnnnnnnnnnnnnnnnnnnnnnnnnnnnnnnnnnnnnnnnnnnnnnnnnnnnnnnnnnnnnnnnnnnnnnnnnnnnnnnnnnnnnnnnnnnnnnnnnnnnnnnnnnnnnnnnnnnnnnnnnnnnnnnnnnnnnnnnnnnnnnnnnnnnnnnnnnnnnnnnnnnnnnnnnnnnnnnnnnnnnnnnnnnnnnnnnnnnnnnnnnnnnnnnnnnnnnnnnnnnnnnnnnnnnnnnnnnnnnnnnnnnnnnnnnnnnnnnnnnnnnnnnnnnnnnnnnnnnnnnnnnnnnnnnnnnnnnnnnnnnnnnnnnnnnnnnnnnnnnnnnnnnnnnnnnnnnnnnnnnnnnnnnnnnnnnnnnnnnnnnnnnnnnnnnnnnnnnnnnnnnnnnnnnnnnnnnnnnnnnnnnnnnnnnnnnnnnnnnnnnnnnnnnnnnnnnnnnnnnnnnnnnnnnnnnnnnnnnnnnnnnnnnnnnnnnnnnnnnnnnnnnnnnnnnnnnnnnnnnnnnnnnnnnnnnnnnnnnnnnnnnnnnnnnnnnnnnnnnnnnnnnnnnnnnnnnnnnnnnnnnnnnnnnnnnnnnnnnnnnnnnnnnnnnnnnnnnnnnnnnnnnnnnnnnnnnnnnnnnnnnnnnnnnnnnnnnnnnnnnnnnnnnnnnnnnnnnnnnnnnnnnnnnnnnnnnnnnnnnnnnnnnnnnnnnnnnnnnnnnnnnnnnnnnnnnnnnnnnnnnnnnnnnnnnnnnnnnnnnnnnnnnnnnnnnnnnnnnnnnnnnnnnnnnnnnnnnnnnnnnnnnnnnnnnnnnnnnnnnnnnnnnnnnnnnnnnnnnnnnnnnnnnnnnnnnnnnnnnnnnnnnnnnnnnnnnnnnnnnnnnnnnnnnnnnnnnnnnnnnnnnnnnnnnnnnnnnnnnnnnnnnnnnnnnnnnnnnnnnnnnnnnnnnnnnnnnnnnnnnnnnnnnnnnnnnnnnnnnnnnnnnnnnnnnnnnnnnnnnnnnnnnnnnnnnnnnnnnnnnnnnnnnnnnnnnnnnnnnnnnnnnnnnnnnnnnnnnnnnnnnnnnnnnnnnnnnnnnnnnnnnnnnnnnnnnnnnnnnnnnnnnnnnnnnnnnnnnnnnnnnnnnnnnnnnnnnnnnnnnnnnnnnnnnnnnnnnnnnnnnnnnnnnnnnnnnnnnnnnnnnnnnnnnnnnnnnnnnnnnnnnnnnnnnnnnnnnnnnnnnnnnnnnnnnnnnnnnnnnnnnnnnnnnnnnnnnnnnnnnnnnnnnnnnnnnnnnnnnnnnnnnnnnnnnnnnnnnnnnnnnnnnnnnnnnnnnnnnnnnnnnnnnnnnnnnnnnnnnnnnnnnnnnnnnnnnnnnnnnnnnnnnnnnnnnnnnnnnnnnnnnnnnnnnnnnnnnnnnnnnnnnnnnnnnnnnnnnnnnnnnnnnnnnnnnnnnnnnnnnnnnnnnnnnnnnnnnnnnnnnnnnnnnnnnnnnnnnnnnnnnnnnnnnnnnnnnnnnnnnnnnnnnnnnnnnnnnnnnnnnnnnnnnnnnnnnnnnnnnnnnnnnnnnnnnnnnnnnnnnnnnnnnnnnnnnnnnnnnnnnnnnnnnnnnnnnnnnnnnnnnnnnnnnnnnnnnnnnnnnnnnnnnnnnnnnnnnnnnnnnnnnnnnnnnnnnnnnnnnnnnnnnnnnnnnnnnnnnnnnnnnnnnnnnnnnnnnnnnnnnnnnnnnnnnnnnnnnnnnnnnnnnnnnnnnnnnnnnnnnnnnnnnnnnnnnnnnnnnnnnnnnnnnnnnnnnnnnnnnnnnnnnnnnnnnnnnnnnnnnnnnnnnnnnnnnnnnnnnnnnnnnnnnnnnnnnnnnnnnnnnnnnnnnnnnnnnnnnnnnnnnnnnnnnnnnnnnnnnnnnnnnnnnnnnnnnnnnnnnnnnnnnnnnnnnnnnnnnnnnnnnnnnnnnnnnnnnnnnnnnnnnnnnnnnnnnnnnnnnnnnnnnnnnnnnnnnnnnnnnnnnnnnnnnnnnnnnnnnnnnnnnnnnnnnnnnnnnnnnnnnnnnnnnnnnnnnnnnnnnnnnnnnnnnnnnnnnnnnnnnnnnnnnnnnnnnnnnnnnnnnnnnnnnnnnnnnnnnnnnnnnnnnnnnnnnnnnnnnnnnnnnnnnnnnnnnnnnnnnnnnnnnnnnnnnnnnnnnnnnnnnnnnnnnnnnnnnnnnnnnnnnnnnnnnnnnnnnnnnnnnnnnnnnnnnnnnnnnnnnnnnnnnnnnnnnnnnnnnnnnnnnnnnnnnnnnnnnnnnnnnnnnnnnnnnnnnnnnnnnnnnnnnnnnnnnnnnnnnnnnnnnnnnnnnnnnnnnnnnnnnnnnnnnnnnnnnnnnnnnnnnnnnnnnnnnnnnnnnnnnnnnnnnnnnnnnnnnnnnnnnnnnnnnnnnnnnnnnnnnnnnnnnnnnnnnnnnnnnnnnnnnnnnnnnnnnnnnnnnnnnnnnnnnnnnnnnnnnnnnnnnnnnnnnnnnnnnnnnnnnnnnnnnnnnnnnnnnnnnnnnnnnnnnnnnnnnnnnnnnnnnnnnnnnnnnnnnnnnnnnnnnnnnnnnnnnnnnnnnnnnnnnnnnnnnnnnnnnnnnnnnnnnnnnnnnnnnnnnnnnnnnnnnnnnnnnnnnnnnnnnnnnnnnnnnnnnnnnnnnnnnnnnnnnnnnnnnnnnnnnnnnnnnnnnnnnnnnnnnnnnnnnnnnnnnnnnnnnnnnnnnnnnnnnnnnnnnnnnnnnnnnnnnnnnnnnnnnnnnnnnnnnnnnnnnnnnnnnnnnnnnnnnnnnnnnnnnnnnnnnnnnnnnnnnnnnnnnnnnnnnnnnnnnnnnnnnnnnnnnnnnnnnnnnnnnnnnnnnnnnnnnnnnnnnnnnnnnnnnnnnnnnnnnnnnnnnnnnnnnnnnnnnnnnnnnnnnnnnnnnnnnnnnnnnnnnnnnnnnnnnnnnnnnnnnnnnnnnnnnnnnnnnnnnnnnnnnnnnnnnnnnnnnnnnnnnnnnnnnnnnnnnnnnnnnnnnnnnnnnnnnnnnnnnnnnnnnnnnnnnnnnnnnnnnnnnnnnnnnnnnnnnnnnnnnnnnnnnnnnnnnnnnnnnnnnnnnnnnnnnnnnnnnnnnnnnnnnnnnnnnnnnnnnnnnnnnnnnnnnnnnnnnnnnnnnnnnnnnnnnnnnnnnnnnnnnnnnnnnnnnnnnnnnnnnnnnnnnnnnnnnnnnnnnnnnnnnnnnnnnnnnnnnnnnnnnnnnnnnnnnnnnnnnnnnnnnnnnnnnnnnnnnnnnnnnnnnnnnnnnnnnnnnnnnnnnnnnnnnnnnnnnnnnnnnnnnnnnnnnnnnnnnnnnnnnnnnnnnnnnnnnnnnnnnnnnnnnnnnnnnnnnnnnnnnnnnnnnnnnnnnnnnnnnnnnnnnnnnnnnnnnnnnnnnnnnnnnnnnnnnnnnnnnnnnnnnnnnnnnnnnnnnnnnnnnnnnnnnnnnnnnnnnnnnnnnnnnnnnnnnnnnnnnnnnnnnnnnnnnnnnnnnnnnnnnnnnnnnnnnnnnnnnnnnnnnnnnnnnnnnnnnnnnnnnnnnnnnnnnnnnnnnnnnnnnnnnnnnnnnnnnnnnnnnnnnnnnnnnnnnnnnnnnnnnnnnnnnnnnnnnnnnnnnnnnnnnnnnnnnnnnnnnnnnnnnnnnnnnnnnnnnnnnnnnnnnnnnnnnnnnnnnnnnnnnnnnnnnnnnnnnnnnnnnnnnnnnnnnnnnnnnnnnnnnnnnnnnnnnnnnnnnnnnnnnnnnnnnnnnnnnnnnnnnnnnnnnnnnnnnnnnnnnnnnnnnnnnnnnnnnnnnnnnnnnnnnnnnnnnnnnnnnnnnnnnnnnnnnnnnnnnnnnnnnnnnnnnnnnnnnnnnnnnnnnnnnnnnnnnnnnnnnnnnnnnnnnnnnnnnnnnnnnnnnnnnnnnnnnnnnnnnnnnnnnnnnnnnnnnnnnnnnnnnnnnnnnnnnnnnnnnnnnnnnnnnnnnnnnnnnnnnnnnnnnnnnnnnnnnnnnnnnnnnnnnnnnnnnnnnnnnnnnnnnnnnnnnnnnnnnnnnnnnnnnnnnnnnnnnnnnnnnnnnnnnnnnnnnnnnnnnnnnnnnnnnnnnnnnnnnnnnnnnnnnnnnnnnnnnnnnnnnnnnnnnnnnnnnnnnnnnnnnnnnnnnnnnnnnnnnnnnnnnnnnnnnnnnnnnnnnnnnnnnnnnnnnnnnnnnnnnnnnnnnnnnnnnnnnnnnnnnnnnnnnnnnnnnnnnnnnnnnnnnnnnnnnnnnnnnnnnnnnnnnnnnnnnnnnnnnnnnnnnnnnnnnnnnnnnnnnnnnnnnnnnnnnnnnnnnnnnnnnnnnnnnnnnnnnnnnnnnnnnnnnnnnnnnnnnnnnnnnnnnnnnnnnnnnnnnnnnnnnnnnnnnnnnnnnnnnnnnnnnnnnnnnnnnnnnnnnnnnnnnnnnnnnnnnnnnnnnnnnnnnnnnnnnnnnnnnnnnnnnnnnnnnnnnnnnnnnnnnnnnnnnnnnnnnnnnnnnnnnnnnnnnnnnnnnnnnnnnnnnnnnnnnnnnnnnnnnnnnnnnnnnnnnnnnnnnnnnnnnnnnnnnnnnnnnnnnnnnnnnnnnnnnnnnnnnnnnnnnnnnnnnnnnnnnnnnnnnnnnnnnnnnnnnnnnnnnnnnnnnnnnnnnnnnnnnnnnnnnnnnnnnnnnnnnnnnnnnnnnnnnnnnnnnnnnnnnnnnnnnnnnnnnnnnnnnnnnnnnnnnnnnnnnnnnnnnnnnnnnnnnnnnnnnnnnnnnnnnnnnnnnnnnnnnnnnnnnnnnnnnnnnnnnnnnnnnnnnnnnnnnnnnnnnnnnnnnnnnnnnnnnnnnnnnnnnnnnnnnnnnnnnnnnnnnnnnnnnnnnnnnnnnnnnnnnnnnnnnnnnnnnnnnnnnnnnnnnnnnnnnnnnnnnnnnnnnnnnnnnnnnnnnnnnnnnnnnnnnnnnnnnnnnnnnnnnnnnnnnnnnnnnnnnnnnnnnnnnnnnnnnnnnnnnnnnnnnnnnnnnnnnnnnnnnnnnnnnnnnnnnnnnnnnnnnnnnnnnnnnnnnnnnnnnnnnnnnnnnnnnnnnnnnnnnnnnnnnnnnnnnnnnnnnnnnnnnnnnnnnnnnnnnnnnnnnnnnnnnnnnnnnnnnnnnnnnnnnnnnnnnnnnnnnnnnnnnnnnnnnnnnnnnnnnnnnnnnnnnnnnnnnnnnnnnnnnnnnnnnnnnnnnnnnnnnnnnnnnnnnnnnnnnnnnnnnnnnnnnnnnnnnnnnnnnnnnnnnnnnnnnnnnnnnnnnnnnnnnnnnnnnnnnnnnnnnnnnnnnnnnnnnnnnnnnnnnnnnnnnnnnnnnnnnnnnnnnnnnnnnnnnnnnnnnnnnnnnnnnnnnnnnnnnnnnnnnnnnnnnnnnnnnnnnnnnnnnnnnnnnnnnnnnnnnnnnnnnnnnnnnnnnnnnnnnnnnnnnnnnnnnnnnnnnnnnnnnnnnnnnnnnnnnnnnnnnnnnnnnnnnnnnnnnnnnnnnnnnnnnnnnnnnnnnnnnnnnnnnnnnnnnnnnnnnnnnnnnnnnnnnnnnnnnnnnnnnnnnnnnnnnnnnnnnnnnnnnnnnnnnnnnnnnnnnnnnnnnnnnnnnnnnnnnnnnnnnnnnnnnnnnnnnnnnnnnnnnnnnnnnnnnnnnnnnnnnnnnnnnnnnnnnnnnnnnnnnnnnnnnnnnnnnnnnnnnnnnnnnnnnnnnnnnnnnnnnnnnnnnnnnnnnnnnnnnnnnnnnnnnnnnnnnnnnnnnnnnnnnnnnnnnnnnnnnnnnnnnnnnnnnnnnnnnnnnnnnnnnnnnnnnnnnnnnnnnnnnnnnnnnnnnnnnnnnnnnnnnnnnnnnnnnnnnnnnnnnnnnnnnnnnnnnnnnnnnnnnnnnnnnnnnnnnnnnnnnnnnnnnnnnnnnnnnnnnnnnnnnnnnnnnnnnnnnnnnnnnnnnnnnnnnnnnnnnnnnnnnnnnnnnnnnnnnnnnnnnnnnnnnnnnnnnnnnnnnnnnnnnnnnnnnnnnnnnnnnnnnnnnnnnnnnnnnnnnnnnnnnnnnnnnnnnnnnnnnnnnnnnnnnnnnnnnnnnnnnnnnnnnnnnnnnnnnnnnnnnnnnnnnnnnnnnnnnnnnnnnnnnnnnnnnnnnnnnnnnnnnnnnnnnnnnnnnnnnnnnnnnnnnnnnnnnnnnnnnnnnnnnnnnnnnnnnnnnnnnnnnnnnnnnnnnnnnnnnnnnnnnnnnnnnnnnnnnnnnnnnnnnnnnnnnnnnnnnnnnnnnnnnnnnnnnnnnnnnnnnnnnnnnnnnnnnnnnnnnnnnnnnnnnnnnnnnnnnnnnnnnnnnnnnnnnnnnnnnnnnnnnnnnnnnnnnnnnnnnnnnnnnnnnnnnnnnnnnnnnnnnnnnnnnnnnnnnnnnnnnnnnnnnnnnnnnnnnnnnnnnnnnnnnnnnnnnnnnnnnnnnnnnnnnnnnnnnnnnnnnnnnnnnnnnnnnnnnnnnnnnnnnnnnnnnnnnnnnnnnnnnnnnnnnnnnnnnnnnnnnnnnnnnnnnnnnnnnnnnnnnnnnnnnnnnnnnnnnnnnnnnnnnnnnnnnnnnnnnnnnnnnnnnnnnnnnnnnnnnnnnnnnnnnnnnnnnnnnnnnnnnnnnnnnnnnnnnnnnnnnnnnnnnnnnnnnnnnnnnnnnnnnnnnnnnnnnnnnnnnnnnnnnnnnnnnnnnnnnnnnnnnnnnnnnnnnnnnnnnnnnnnnnnnnnnnnnnnnnnnnnnnnnnnnnnnnnnnnnnnnnnnnnnnnnnnnnnnnnnnnnnnnnnnnnnnnnnnnnnnnnnnnnnnnnnnnnnnnnnnnnnnnnnnnnnnnnnnnnnnnnnnnnnnnnnnnnnnnnnnnnnnnnnnnnnnnnnnnnnnnnnnnnnnnnnnnnnnnnnnnnnnnnnnnnnnnnnnnnnnnnnnnnnnnnnnnnnnnnnnnnnnnnnnnnnnnnnnnnnnnnnnnnnnnnnnnnnnnnnnnnnnnnnnnnnnnnnnnnnnnnnnnnnnnnnnnnnnnnnnnnnnnnnnnnnnnnnnnnnnnnnnnnnnnnnnnnnnnnnnnnnnnnnnnnnnnnnnnnnnnnnnnnnnnnnnnnnnnnnnnnnnnnnnnnnnnnnnnnnnnnnnnnnnnnnnnnnnnnnnnnnnnnnnnnnnnnnnnnnnnnnnnnnnnnnnnnnnnnnnnnnnnnnnnnnnnnnnnnnnnnnnnnnnnnnnnnnnnnnnnnnnnnnnnnnnnnnnnnnnnnnnnnnnnnnnnnnnnnnnnnnnnnnnnnnnnnnnnnnnnnnnnnnnnnnnnnnnnnnnnnnnnnnnnnnnnnnnnnnnnnnnnnnnnnnnnnnnnnnnnnnnnnnnnnnnnnnnnnnnnnnnnnnnnnnnnnnnnnnnnnnnnnnnnnnnnnnnnnnnnnnnnnnnnnnnnnnnnnnnnnnnnnnnnnnnnnnnnnnnnnnnnnnnnnnnnnnnnnnnnnnnnnnnnnnnnnnnnnnnnnnnnnnnnnnnnnnnnnnnnnnnnnnnnnnnnnnnnnnnnnnnnnnnnnnnnnnnnnnnnnnnnnnnnnnnnnnnnnnnnnnnnnnnnnnnnnnnnnnnnnnnnnnnnnnnnnnnnnnnnnnnnnnnnnnnnnnnnnnnnnnnnnnnnnnnnnnnnnnnnnnnnnnnnnnnnnnnnnnnnnnnnnnnnnnnnnnnnnnnnnnnnnnnnnnnnnnnnnnnnnnnnnnnnnnnnnnnnnnnnnnnnnnnnnnnnnnnnnnnnnnnnnnnnnnnnnnnnnnnnnnnnnnnnnnnnnnnnnnnnnnnnnnnnnnnnnnnnnnnnnnnnnnnnnnnnnnnnnnnnnnnnnnnnnnnnnnnnnnnnnnnnnnnnnnnnnnnnnnnnnnnnnnnnnnnnnnnnnnnnnnnnnnnnnnnnnnnnnnnnnnnnnnnnnnnnnnnnnnnnnnnnnnnnnnnnnnnnnnnnnnnnnnnnnnnnnnnnnnnnnnnnnnnnnnnnnnnnnnnnnnnnnnnnnnnnnnnnnnnnnnnnnnnnnnnnnnnnnnnnnnnnnnnnnnnnnnnnnnnnnnnnnnnnnnnnnnnnnnnnnnnnnnnnnnnnnnnnnnnnnnnnnnnnnnnnnnnnnnnnnnnnnnnnnnnnnnnnnnnnnnnnnnnnnnnnnnnnnnnnnnnnnnnnnnnnnnnnnnnnnnnnnnnnnnnnnnnnnnnnnnnnnnnnnnnnnnnnnnnnnnnnnnnnnnnnnnnnnnnnnnnnnnnnnnnnnnnnnnnnnnnnnnnnnnnnnnnnnnnnnnnnnnnnnnnnnnnnnnnnnnnnnnnnnnnnnnnnnnnnnnnnnnnnnnnnnnnnnnnnnnnnnnnnnnnnnnnnnnnnnnnnnnnnnnnnnnnnnnnnnnnnnnnnnnnnnnnnnnnnnnnnnnnnnnnnnnnnnnnnnnnnnnnnnnnnnnnnnnnnnnnnnnnnnnnnnnnnnnnnnnnnnnnnnnnnnnnnnnnnnnnnnnnnnnnnnnnnnnnnnnnnnnnnnnnnnnnnnnnnnnnnnnnnnnnnnnnnnnnnnnnnnnnnnnnnnnnnnnnnnnnnnnnnnnnnnnnnnnnnnnnnnnnnnnnnnnnnnnnnnnnnnnnnnnnnnnnnnnnnnnnnnnnnnnnnnnnnnnnnnnnnnnnnnnnnnnnnnnnnnnnnnnnnnnnnnnnnnnnnnnnnnnnnnnnnnnnnnnnnnnnnnnnnnnnnnnnnnnnnnnnnnnnnnnnnnnnnnnnnnnnnnnnnnnnnnnnnnnnnnnnnnnnnnnnnnnnnnnnnnnnnnnnnnnnnnnnnnnnnnnnnnnnnnnnnnnnnnnnnnnnnnnnnnnnnnnnnnnnnnnnnnnnnnnnnnnnnnnnnnnnnnnnnnnnnnnnnnnnnnnnnnnnnnnnnnnnnnnnnnnnnnnnnnnnnnnnnnnnnnnnnnnnnnnnnnnnnnnnnnnnnnnnnnnnnnnnnnnnnnnnnnnnnnnnnnnnnnnnnnnnnnnnnnnnnnnnnnnnnnnnnnnnnnnnnnnnnnnnnnnnnnnnnnnnnnnnnnnnnnnnnnnnnnnnnnnnnnnnnnnnnnnnnnnnnnnnnnnnnnnnnnnnnnnnnnnnnnnnnnnnnnnnnnnnnnnnnnnnnnnnnnnnnnnnnnnnnnnnnnnnnnnnnnnnnnnnnnnnnnnnnnnnnnnnnnnnnnnnnnnnnnnnnnnnnnnnnnnnnnnnnnnnnnnnnnnnnnnnnnnnnnnnnnnnnnnnnnnnnnnnnnnnnnnnnnnnnnnnnnnnnnnnnnnnnnnnnnnnnnnnnnnnnnnnnnnnnnnnnnnnnnnnnnnnnnnnnnnnnnnnnnnnnnnnnnnnnnnnnnnnnnnnnnnnnnnnnnnnnnnnnnnnnnnnnnnnnnnnnnnnnnnnnnnnnnnnnnnnnnnnnnnnnnnnnnnnnnnnnnnnnnnnnnnnnnnnnnnnnnnnnnnnnnnnnnnnnnnnnnnnnnnnnnnnnnnnnnnnnnnnnnnnnnnnnnnnnnnnnnnnnnnnnnnnnnnnnnnnnnnnnnnnnnnnnnnnnnnnnnnnnnnnnnnnnnnnnnnnnnnnnnnnnnnnnnnnnnnnnnnnnnnnnnnnnnnnnnnnnnnnnnnnnnnnnnnnnnnnnnnnnnnnnnnnnnnnnnnnnnnnnnnnnnnnnnnnnnnnnnnnnnnnnnnnnnnnnnnnnnnnnnnnnnnnnnnnnnnnnnnnnnnnnnnnnnnnnnnnnnnnnnnnnnnnnnnnnnnnnnnnnnnnnnnnnnnnnnnnnnnnnnnnnnnnnnnnnnnnnnnnnnnnnnnnnnnnnnnnnnnnnnnnnnnnnnnnnnnnnnnnnnnnnnnnnnnnnnnnnnnnnnnnnnnnnnnnnnnnnnnnnnnnnnnnnnnnnnnnnnnnnnnnnnnnnnnnnnnnnnnnnnnnnnnnnnnnnnnnnnnnnnnnnnnnnnnnnnnnnnnnnnnnnnnnnnnnnnnnnnnnnnnnnnnnnnnnnnnnnnnnnnnnnnnnnnnnnnnnnnnnnnnnnnnnnnnnnnnnnnnnnnnnnnnnnnnnnnnnnnnnnnnnnnnnnnnnnnnnnnnnnnnnnnnnnnnnnnnnnnnnnnnnnnnnnnnnnnnnnnnnnnnnnnnnnnnnnnnnnnnnnnnnnnnnnnnnnnnnnnnnnnnnnnnnnnnnnnnnnnnnnnnnnnnnnnnnnnnnnnnnnnnnnnnnnnnnnnnnnnnnnnnnnnnnnnnnnnnnnnnnnnnnnnnnnnnnnnnnnnnnnnnnnnnnnnnnnnnnnnnnnnnnnnnnnnnnnnnnnnnnnnnnnnnnnnnnnnnnnnnnnnnnnnnnnnnnnnnnnnnnnnnnnnnnnnnnnnnnnnnnnnnnnnnnnnnnnnnnnnnnnnnnnnnnnnnnnnnnnnnnnnnnnnnnnnnnnnnnnnnnnnnnnnnnnnnnnnnnnnnnnnnnnnnnnnnnnnnnnnnnnnnnnnnnnnnnnnnnnnnnnnnnnnnnnnnnnnnnnnnnnnnnnnnnnnnnnnnnnnnnnnnnnnnnnnnnnnnnnnnnnnnnnnnnnnnnnnnnnnnnnnnnnnnnnnnnnnnnnnnnnnnnnnnnnnnnnnnnnnnnnnnnnnnnnnnnnnnnnnnnnnnnnnnnnnnnnnnnnnnnnnnnnnnnnnnnnnnnnnnnnnnnnnnnnnnnnnnnnnnnnnnnnnnnnnnnnnnnnnnnnnnnnnnnnnnnnnnnnnnnnnnnnnnnnnnnnnnnnnnnnnnnnnnnnnnnnnnnnnnnnnnnnnnnnnnnnnnnnnnnnnnnnnnnnnnnnnnnnnnnnnnnnnnnnnnnnnnnnnnnnnnnnnnnnnnnnnnnnnnnnnnnnnnnnnnnnnnnnnnnnnnnnnnnnnnnnnnnnnnnnnnnnnnnnnnnnnnnnnnnnnnnnnnnnnnnnnnnnnnnnnnnnnnnnnnnnnnnnnnnnnnnnnnnnnnnnnnnnnnnnnnnnnnnnnnnnnnnnnnnnnnnnnnnnnnnnnnnnnnnnnnnnnnnnnnnnnnnnnnnnnnnnnnnnnnnnnnnnnnnnnnnnnnnnnnnnnnnnnnnnnnnnnnnnnnnnnnnnnnnnnnnnnnnnnnnnnnnnnnnnnnnnnnnnnnnnnnnnnnnnnnnnnnnnnnnnnnnnnnnnnnnnnnnnnnnnnnnnnnnnnnnnnnnnnnnnnnnnnnnnnnnnnnnnnnnnnnnnnnnnnnnnnnnnnnnnnnnnnnnnnnnnnnnnnnnnnnnnnnnnnnnnnnnnnnnnnnnnnnnnnnnnnnnnnnnnnnnnnnnnnnnnnnnnnnnnnnnnnnnnnnnnnnnnnnnnnnnnnnnnnnnnnnnnnnnnnnnnnnnnnnnnnnnnnnnnnnnnnnnnnnnnnnnnnnnnnnnnnnnnnnnnnnnnnnnnnnnnnnnnnnnnnnnnnnnnnnnnnnnnnnnnnnnnnnnnnnnnnnnnnnnnnnnnnnnnnnnnnnnnnnnnnnnnnnnnnnnnnnnnnnnnnnnnnnnnnnnnnnnnnnnnnnnnnnnnnnnnnnnnnnnnnnnnnnnnnnnnnnnnnnnnnnnnnnnnnnnnnnnnnnnnnnnnnnnnnnnnnnnnnnnnnnnnnnnnnnnnnnnnnnnnnnnnnnnnnnnnnnnnnnnnnnnnnnnnnnnnnnnnnnnnnnnnnnnnnnnnnnnnnnnnnnnnnnnnnnnnnnnnnnnnnnnnnnnnnnnnnnnnnnnnnnnnnnnnnnnnnnnnnnnnnnnnnnnnnnnnnnnnnnnnnnnnnnnnnnnnnnnnnnnnnnnnnnnnnnnnnnnnnnnnnnnnnnnnnnnnnnnnnnnnnnnnnnnnnnnnnnnnnnnnnnnnnnnnnnnnnnnnnnnnnnnnnnnnnnnnnnnnnnnnnnnnnnnnnnnnnnnnnnnnnnnnnnnnnnnnnnnnnnnnnnnnnnnnnnnnnnnnnnnnnnnnnnnnnnnnnnnnnnnnnnnnnnnnnnnnnnnnnnnnnnnnnnnnnnnnnnnnnnnnnnnnnnnnnnnnnnnnnnnnnnnnnnnnnnnnnnnnnnnnnnnnnnnnnnnnnnnnnnnnnnnnnnnnnnnnnnnnnnnnnnnnnnnnnnnnnnnnnnnnnnnnnnnnnnnnnnnnnnnnnnnnnnnnnnnnnnnnnnnnnnnnnnnnnnnnnnnnnnnnnnnnnnnnnnnnnnnnnnnnnnnnnnnnnnnnnnnnnnnnnnnnnnnnnnnnnnnnnnnnnnnnnnnnnnnnnnnnnnnnnnnnnnnnnnnnnnnnnnnnnnnnnnnnnnnnnnnnnnnnnnnnnnnnnnnnnnnnnnnnnnnnnnnnnnnnnnnnnnnnnnnnnnnnnnnnnnnnnnnnnnnnnnnnnnnnnnnnnnnnnnnnnnnnnnnnnnnnnnnnnnnnnnnnnnnnnnnnnnnnnnnnnnnnnnnnnnnnnnnnnnnnnnnnnnnnnnnnnnnnnnnnnnnnnnnnnnnnnnnnnnnnnnnnnnnnnnnnnnnnnnnnnnnnnnnnnnnnnnnnnnnnnnnnnnnnnnnnnnnnnnnnnnnnnnnnnnnnnnnnnnnnnnnnnnnnnnnnnnnnnnnnnnnnnnnnnnnnnnnnnnnnnnnnnnnnnnnnnnnnnnnnnnnnnnnnnnnnnnnnnnnnnnnnnnnnnnnnnnnnnnnnnnnnnnnnnnnnnnnnnnnnnnnnnnnnnnnnnnnnnnnnnnnnnnnnnnnnnnnnnnnnnnnnnnnnnnnnnnnnnnnnnnnnnnnnnnnnnnnnnnnnnnnnnnnnnnnnnnnnnnnnnnnnnnnnnnnnnnnnnnnnnnnnnnnnnnnnnnnnnnnnnnnnnnnnnnnnnnnnnnnnnnnnnnnnnnnnnnnnnnnnnnnnnnnnnnnnnnnnnnnnnnnnnnnnnnnnnnnnnnnnnnnnnnnnnnnnnnnnnnnnnnnnnnnnnnnnnnnnnnnnnnnnnnnnnnnnnnnnnnnnnnnnnnnnnnnnnnnnnnnnnnnnnnnnnnnnnnnnnnnnnnnnnnnnnnnnnnnnnnnnnnnnnnnnnnnnnnnnnnnnnnnnnnnnnnnnnnnnnnnnnnnnnnnnnnnnnnnnnnnnnnnnnnnnnnnnnnnnnnnnnnnnnnnnnnnnnnnnnnnnnnnnnnnnnnnnnnnnnnnnnnnnnnnnnnnnnnnnnnnnnnnnnnnnnnnnnnnnnnnnnnnnnnnnnnnnnnnnnnnnnnnnnnnnnnnnnnnnnnnnnnnnnnnnnnnnnnnnnnnnnnnnnnnnnnnnnnnnnnnnnnnnnnnnnnnnnnnnnnnnnnnnnnnnnnnnnnnnnnnnnnnnnnnnnnnnnnnnnnnnnnnnnnnnnnnnnnnnnnnnnnnnnnnnnnnnnnnnnnnnnnnnnnnnnnnnnnnnnnnnnnnnnnnnnnnnnnnnnnnnnnnnnnnnnnnnnnnnnnnnnnnnnnnnnnnnnnnnnnnnnnnnnnnnnnnnnnnnnnnnnnnnnnnnnnnnnnnnnnnnnnnnnnnnnnnnnnnnnnnnnnnnnnnnnnnnnnnnnnnnnnnnnnnnnnnnnnnnnnnnnnnnnnnnnnnnnnnnnnnnnnnnnnnnnnnnnnnnnnnnnnnnnnnnnnnnnnnnnnnnnnnnnnnnnnnnnnnnnnnnnnnnnnnnnnnnnnnnnnnnnnnnnnnnnnnnnnnnnnnnnnnnnnnnnnnnnnnnnnnnnnnnnnnnnnnnnnnnnnnnnnnnnnnnnnnnnnnnnnnnnnnnnnnnnnnnnnnnnnnnnnnnnnnnnnnnnnnnnnnnnnnnnnnnnnnnnnnnnnnnnnnnnnnnnnnnnnnnnnnnnnnnnnnnnnnnnnnnnnnnnnnnnnnnnnnnnnnnnnnnnnnnnnnnnnnnnnnnnnnnnnnnnnnnnnnnnnnnnnnnnnnnnnnnnnnnnnnnnnnnnnnnnnnnnnnnnnnnnnnnnnnnnnnnnnnnnnnnnnnnnnnnnnnnnnnnnnnnnnnnnnnnnnnnnnnnnnnnnnnnnnnnnnnnnnnnnnnnnnnnnnnnnnnnnnnnnnnnnnnnnnnnnnnnnnnnnnnnnnnnnnnnnnnnnnnnnnnnnnnnnnnnnnnnnnnnnnnnnnnnnnnnnnnnnnnnnnnnnnnnnnnnnnnnnnnnnnnnnnnnnnnnnnnnnnnnnnnnnnnnnnnnnnnnnnnnnnnnnnnnnnnnnnnnnnnnnnnnnnnnnnnnnnnnnnnnnnnnnnnnnnnnnnnnnnnnnnnnnnnnnnnnnnnnnnnnnnnnnnnnnnnnnnnnnnnnnnnnnnnnnnnnnnnnnnnnnnnnnnnnnnnnnnnnnnnnnnnnnnnnnnnnnnnnnnnnnnnnnnnnnnnnnnnnnnnnnnnnnnnnnnnnnnnnnnnnnnnnnnnnnnnnnnnnnnnnnnnnnnnnnnnnnnnnnnnnnnnnnnnnnnnnnnnnnnnnnnnnnnnnnnnnnnnnnnnnnnnnnnnnnnnnnnnnnnnnnnnnnnnnnnnnnnnnnnnnnnnnnnnnnnnnnnnnnnnnnnnnnnnnnnnnnnnnnnnnnnnnnnnnnnnnnnnnnnnnnnnnnnnnnnnnnnnnnnnnnnnnnnnnnnnnnnnnnnnnnnnnnnnnnnnnnnnnnnnnnnnnnnnnnnnnnnnnnnnnnnnnnnnnnnnnnnnnnnnnnnnnnnnnnnnnnnnnnnnnnnnnnnnnnnnnnnnnnnnnnnnnnnnnnnnnnnnnnnnnnnnnnnnnnnnnnnnnnnnnnnnnnnnnnnnnnnnnnnnnnnnnnnnnnnnnnnnnnnnnnnnnnnnnnnnnnnnnnnnnnnnnnnnnnnnnnnnnnnnnnnnnnnnnnnnnnnnnnnnnnnnnnnnnnnnnnnnnnnnnnnnnnnnnnnnnnnnnnnnnnnnnnnnnnnnnnnnnnnnnnnnnnnnnnnnnnnnnnnnnnnnnnnnnnnnnnnnnnnnnnnnnnnnnnnnnnnnnnnnnnnnnnnnnnnnnnnnnnnnnnnnnnnnnnnnnnnnnnnnnnnnnnnnnnnnnnnnnnnnnnnnnnnnnnnnnnnnnnnnnnnnnnnnnnnnnnnnnnnnnnnnnnnnnnnnnnnnnnnnnnnnnnnnnnnnnnnnnnnnnnnnnnnnnnnnnnnnnnnnnnnnnnnnnnnnnnnnnnnnnnnnnnnnnnnnnnnnnnnnnnnnnnnnnnnnnnnnnnnnnnnnnnnnnnnnnnnnnnnnnnnnnnnnnnnnnnnnnnnnnnnnnnnnnnnnnnnnnnnnnnnnnnnnnnnnnnnnnnnnnnnnnnnnnnnnnnnnnnnnnnnnnnnnnnnnnnnnnnnnnnnnnnnnnnnnnnnnnnnnnnnnnnnnnnnnnnnnnnnnnnnnnnnnnnnnnnnnnnnnnnnnnnnnnnnnnnnnnnnnnnnnnnnnnnnnnnnnnnnnnnnnnnnnnnnnnnnnnnnnnnnnnnnnnnnnnnnnnnnnnnnnnnnnnnnnnnnnnnnnnnnnnnnnnnnnnnnnnnnnnnnnnnnnnnnnnnnnnnnnnnnnnnnnnnnnnnnnnnnnnnnnnnnnnnnnnnnnnnnnnnnnnnnnnnnnnnnnnnnnnnnnnnnnnnnnnnnnnnnnnnnnnnnnnnnnnnnnnnnnnnnnnnnnnnnnnnnnnnnnnnnnnnnnnnnnnnnnnnnnnnnnnnnnnnnnnnnnnnnnnnnnnnnnnnnnnnnnnnnnnnnnnnnnnnnnnnnnnnnnnnnnnnnnnnnnnnnnnnnnnnnnnnnnnnnnnnnnnnnnnnnnnnnnnnnnnnnnnnnnnnnnnnnnnnnnnnnnnnnnnnnnnnnnnnnnnnnnnnnnnnnnnnnnnnnnnnnnnnnnnnnnnnnnnnnnnnnnnnnnnnnnnnnnnnnnnnnnnnnnnnnnnnnnnnnnnnnnnnnnnnnnnnnnnnnnnnnnnnnnnnnnnnnnnnnnnnnnnnnnnnnnnnnnnnnnnnnnnnnnnnnnnnnnnnnnnnnnnnnnnnnnnnnnnnnnnnnnnnnnnnnnnnnnnnnnnnnnnnnnnnnnnnnnnnnnnnnnnnnnnnnnnnnnnnnnnnnnnnnnnnnnnnnnnnnnnnnnnnnnnnnnnnnnnnnnnnnnnnnnnnnnnnnnnnnnnnnnnnnnnnnnnnnnnnnnnnnnnnnnnnnnnnnnnnnnnnnnnnnnnnnnnnnnnnnnnnnnnnnnnnnnnnnnnnnnnnnnnnnnnnnnnnnnnnnnnnnnnnnnnnnnnnnnnnnnnnnnnnnnnnnnnnnnnnnnnnnnnnnnnnnnnnnnnnnnnnnnnnnnnnnnnnnnnnnnnnnnnnnnnnnnnnnnnnnnnnnnnnnnnnnnnnnnnnnnnnnnnnnnnnnnnnnnnnnnnnnnnnnnnnnnnnnnnnnnnnnnnnnnnnnnnnnnnnnnnnnnnnnnnnnnnnnnnnnnnnnnnnnnnnnnnnnnnnnnnnnnnnnnnnnnnnnnnnnnnnnnnnnnnnnnnnnnnnnnnnnnnnnnnnnnnnnnnnnnnnnnnnnnnnnnnnnnnnnnnnnnnnnnnnnnnnnnnnnnnnnnnnnnnnnnnnnnnnnnnnnnnnnnnnnnnnnnnnnnnnnnnnnnnnnnnnnnnnnnnnnnnnnnnnnnnnnnnnnnnnnnnnnnnnnnnnnnnnnnnnnnnnnnnnnnnnnnnnnnnnnnnnnnnnnnnnnnnnnnnnnnnnnnnnnnnnnnnnnnnnnnnnnnnnnnnnnnnnnnnnnnnnnnnnnnnnnnnnnnnnnnnnnnnnnnnnnnnnnnnnnnnnnnnnnnnnnnnnnnnnnnnnnnnnnnnnnnnnnnnnnnnnnnnnnnnnnnnnnnnnnnnnnnnnnnnnnnnnnnnnnnnnnnnnnnnnnnnnnnnnnnnnnnnnnnnnnnnnnnnnnnnnnnnnnnnnnnnnnnnnnnnnnnnnnnnnnnnnnnnnnnnnnnnnnnnnnnnnnnnnnnnnnnnnnnnnnnnnnnnnnnnnnnnnnnnnnnnnnnnnnnnnnnnnnnnnnnnnnnnnnnnnnnnnnnnnnnnnnnnnnnnnnnnnnnnnnnnnnnnnnnnnnnnnnnnnnnnnnnnnnnnnnnnnnnnnnnnnnnnnnnnnnnnnnnnnnnnnnnnnnnnnnnnnnnnnnnnnnnnnnnnnnnnnnnnnnnnnnnnnnnnnnnnnnnnnnnnnnnnnnnnnnnnnnnnnnnnnnnnnnnnnnnnnnnnnnnnnnnnnnnnnnnnnnnnnnnnnnnnnnnnnnnnnnnnnnnnnnnnnnnnnnnnnnnnnnnnnnnnnnnnnnnnnnnnnnnnnnnnnnnnnnnnnnnnnnnnnnnnnnnnnnnnnnnnnnnnnnnnnnnnnnnnnnnnnnnnnnnnnnnnnnnnnnnnnnnnnnnnnnnnnnnnnnnnnnnnnnnnnnnnnnnnnnnnnnnnnnnnnnnnnnnnnnnnnnnnnnnnnnnnnnnnnnnnnnnnnnnnnnnnnnnnnnnnnnnnnnnnnnnnnnnnnnnnnnnnnnnnnnnnnnnnnnnnnnnnnnnnnnnnnnnnnnnnnnnnnnnnnnnnnnnnnnnnnnnnnnnnnnnnnnnnnnnnnnnnnnnnnnnnnnnnnnnnnnnnnnnnnnnnnnnnnnnnnnnnnnnnnnnnnnnnnnnnnnnnnnnnnnnnnnnnnnnnnnnnnnnnnnnnnnnnnnnnnnnnnnnnnnnnnnnnnnnnnnnnnnnnnnnnnnnnnnnnnnnnnnnnnnnnnnnnnnnnnnnnnnnnnnnnnnnnnnnnnnnnnnnnnnnnnnnnnnnnnnnnnnnnnnnnnnnnnnnnnnnnnnnnnnnnnnnnnnnnnnnnnnnnnnnnnnnnnnnnnnnnnnnnnnnnnnnnnnnnnnnnnnnnnnnnnnnnnnnnnnnnnnnnnnnnnnnnnnnnnnnnnnnnnnnnnnnnnnnnnnnnnnnnnnnnnnnnnnnnnnnnnnnnnnnnnnnnnnnnnnnnnnnnnnnnnnnnnnnnnnnnnnnnnnnnnnnnnnnnnnnnnnnnnnnnnnnnnnnnnnnnnnnnnnnnnnnnnnnnnnnnnnnnnnnnnnnnnnnnnnnnnnnnnnnnnnnnnnnnnnnnnnnnnnnnnnnnnnnnnnnnnnnnnnnnnnnnnnnnnnnnnnnnnnnnnnnnnnnnnnnnnnnnnnnnnnnnnnnnnnnnnnnnnnnnnnnnnnnnnnnnnnnnnnnnnnnnnnnnnnnnnnnnnnnnnnnnnnnnnnnnnnnnnnnnnnnnnnnnnnnnnnnnnnnnnnnnnnnnnnnnnnnnnnnnnnnnnnnnnnnnnnnnnnnnnnnnnnnnnnnnnnnnnnnnnnnnnnnnnnnnnnnnnnnnnnnnnnnnnnnnnnnnnnnnnnnnnnnnnnnnnnnnnnnnnnnnnnnnnnnnnnnnnnnnnnnnnnnnnnnnnnnnnnnnnnnnnnnnnnnnnnnnnnnnnnnnnnnnnnnnnnnnnnnnnnnnnnnnnnnnnnnnnnnnnnnnnnnnnnnnnnnnnnnnnnnnnnnnnnnnnnnnnnnnnnnnnnnnnnnnnnnnnnnnnnnnnnnnnnnnnnnnnnnnnnnnnnnnnnnnnnnnnnnnnnnnnnnnnnnnnnnnnnnnnnnnnnnnnnnnnnnnnnnnnnnnnnnnnnnnnnnnnnnnnnnnnnnnnnnnnnnnnnnnnnnnnnnnnnnnnnnnnnnnnnnnnnnnnnnnnnnnnnnnnnnnnnnnnnnnnnnnnnnnnnnnnnnnnnnnnnnnnnnnnnnnnnnnnnnnnnnnnnnnnnnnnnnnnnnnnnnnnnnnnnnnnnnnnnnnnnnnnnnnnnnnnnnnnnnnnnnnnnnnnnnnnnnnnnnnnnnnnnnnnnnnnnnnnnnnnnnnnnnnnnnnnnnnnnnnnnnnnnnnnnnnnnnnnnnnnnnnnnnnnnnnnnnnnnnnnnnnnnnnnnnnnnnnnnnnnnnnnnnnnnnnnnnnnnnnnnnnnnnnnnnnnnnnnnnnnnnnnnnnnnnnnnnnnnnnnnnnnnnnnnnnnnnnnnnnnnnnnnnnnnnnnnnnnnnnnnnnnnnnnnnnnnnnnnnnnnnnnnnnnnnnnnnnnnnnnnnnnnnnnnnnnnnnnnnnnnnnnnnnnnnnnnnnnnnnnnnnnnnnnnnnnnnnnnnnnnnnnnnnnnnnnnnnnnnnnnnnnnnnnnnnnnnnnnnnnnnnnnnnnnnnnnnnnnnnnnnnnnnnnnnnnnnnnnnnnnnnnnnnnnnnnnnnnnnnnnnnnnnnnnnnnnnnnnnnnnnnnnnnnnnnnnnnnnnnnnnnnnnnnnnnnnnnnnnnnnnnnnnnnnnnnnnnnnnnnnnnnnnnnnnnnnnnnnnnnnnnnnnnnnnnnnnnnnnnnnnnnnnnnnnnnnnnnnnnnnnnnnnnnnnnnnnnnnnnnnnnnnnnnnnnnnnnnnnnnnnnnnnnnnnnnnnnnnnnnnnnnnnnnnnnnnnnnnnnnnnnnnnnnnnnnnnnnnnnnnnnnnnnnnnnnnnnnnnnnnnnnnnnnnnnnnnnnnnnnnnnnnnnnnnnnnnnnnnnnnnnnnnnnnnnnnnnnnnnnnnnnnnnnnnnnnnnnnnnnnnnnnnnnnnnnnnnnnnnnnnnnnnnnnnnnnnnnnnnnnnnnnnnnnnnnnnnnnnnnnnnnnnnnnnnnnnnnnnnnnnnnnnnnnnnnnnnnnnnnnnnnnnnnnnnnnnnnnnnnnnnnnnnnnnnnnnnnnnnnnnnnnnnnnnnnnnnnnnnnnnnnnnnnnnnnnnnnnnnnnnnnnnnnnnnnnnnnnnnnnnnnnnnnnnnnnnnnnnnnnnnnnnnnnnnnnnnnnnnnnnnnnnnnnnnnnnnnnnnnnnnnnnnnnnnnnnnnnnnnnnnnnnnnnnnnnnnnnnnnnnnnnnnnnnnnnnnnnnnnnnnnnnnnnnnnnnnnnnnnnnnnnnnnnnnnnnnnnnnnnnnnnnnnnnnnnnnnnnnnnnnnnnnnnnnnnnnnnnnnnnnnnnnnnnnnnnnnnnnnnnnnnnnnnnnnnnnnnnnnnnnnnnnnnnnnnnnnnnnnnnnnnnnnnnnnnnnnnnnnnnnnnnnnnnnnnnnnnnnnnnnnnnnnnnnnnnnnnnnnnnnnnnnnnnnnnnnnnnnnnnnnnnnnnnnnnnnnnnnnnnnnnnnnnnnnnnnnnnnnnnnnnnnnnnnnnnnnnnnnnnnnnnnnnnnnnnnnnnnnnnnnnnnnnnnnnnnnnnnnnnnnnnnnnnnnnnnnnnnnnnnnnnnnnnnnnnnnnnnnnnnnnnnnnnnnnnnnnnnnnnnnnnnnnnnnnnnnnnnnnnnnnnnnnnnnnnnnnnnnnnnnnnnnnnnnnnnnnnnnnnnnnnnnnnnnnnnnnnnnnnnnnnnnnnnnnnnnnnnnnnnnnnnnnnnnnnnnnnnnnnnnnnnnnnnnnnnnnnnnnnnnnnnnnnnnnnnnnnnnnnnnnnnnnnnnnnnnnnnnnnnnnnnnnnnnnnnnnnnnnnnnnnnnnnnnnnnnnnnnnnnnnnnnnnnnnnnnnnnnnnnnnnnnnnnnnnnnnnnnnnnnnnnnnnnnnnnnnnnnnnnnnnnnnnnnnnnnnnnnnnnnnnnnnnnnnnnnnnnnnnnnnnnnnnnnnnnnnnnnnnnnnnnnnnnnnnnnnnnnnnnnnnnnnnnnnnnnnnnnnnnnnnnnnnnnnnnnnnnnnnnnnnnnnnnnnnnnnnnnnnnnnnnnnnnnnnnnnnnnnnnnnnnnnnnnnnnnnnnnnnnnnnnnnnnnnnnnnnnnnnnnnnnnnnnnnnnnnnnnnnnnnnnnnnnnnnnnnnnnnnnnnnnnnnnnnnnnnnnnnnnnnnnnnnnnnnnnnnnnnnnnnnnnnnnnnnnnnnnnnnnnnnnnnnnnnnnnnnnnnnnnnnnnnnnnnnnnnnnnnnnnnnnnnnnnnnnnnnnnnnnnnnnnnnnnnnnnnnnnnnnnnnnnnnnnnnnnnnnnnnnnnnnnnnnnnnnnnnnnnnnnnnnnnnnnnnnnnnnnnnnnnnnnnnnnnnnnnnnnnnnnnnnnnnnnnnnnnnnnnnnnnnnnnnnnnnnnnnnnnnnnnnnnnnnnnnnnnnnnnnnnnnnnnnnnnnnnnnnnnnnnnnnnnnnnnnnnnnnnnnnnnnnnnnnnnnnnnnnnnnnnnnnnnnnnnnnnnnnnnnnnnnnnnnnnnnnnnnnnnnnnnnnnnnnnnnnnnnnnnnnnnnnnnnnnnnnnnnnnnnnnnnnnnnnnnnnnnnnnnnnnnnnnnnnnnnnnnnnnnnnnnnnnnnnnnnnnnnnnnnnnnnnnnnnnnnnnnnnnnnnnnnnnnnnnnnnnnnnnnnnnnnnnnnnnnnnnnnnnnnnnnnnnnnnnnnnnnnnnnnnnnnnnnnnnnnnnnnnnnnnnnnnnnnnnnnnnnnnnnnnnnnnnnnnnnnnnnnnnnnnnnnnnnnnnnnnnnnnnnnnnnnnnnnnnnnnnnnnnnnnnnnnnnnnnnnnnnnnnnnnnnnnnnnnnnnnnnnnnnnnnnnnnnnnnnnnnnnnnnnnnnnnnnnnnnnnnnnnnnnnnnnnnnnnnnnnnnnnnnnnnnnnnnnnnnnnnnnnnnnnnnnnnnnnnnnnnnnnnnnnnnnnnnnnnnnnnnnnnnnnnnnnnnnnnnnnnnnnnnnnnnnnnnnnnnnnnnnnnnnnnnnnnnnnnnnnnnnnnnnnnnnnnnnnnnnnnnnnnnnnnnnnnnnnnnnnnnnnnnnnnnnnnnnnnnnnnnnnnnnnnnnnnnnnnnnnnnnnnnnnnnnnnnnnnnnnnnnnnnnnnnnnnnnnnnnnnnnnnnnnnnnnnnnnnnnnnnnnnnnnnnnnnnnnnnnnnnnnnnnnnnnnnnnnnnnnnnnnnnnnnnnnnnnnnnnnnnnnnnnnnnnnnnnnnnnnnnnnnnnnnnnnnnnnnnnnnnnnnnnnnnnnnnnnnnnnnnnnnnnnnnnnnnnnnnnnnnnnnnnnnnnnnnnnnnnnnnnnnnnnnnnnnnnnnnnnnnnnnnnnnnnnnnnnnnnnnnnnnnnnnnnnnnnnnnnnnnnnnnnnnnnnnnnnnnnnnnnnnnnnnnnnnnnnnnnnnnnnnnnnnnnnnnnnnnnnnnnnnnnnnnnnnnnnnnnnnnnnnnnnnnnnnnnnnnnnnnnnnnnnnnnnnnnnnnnnnnnnnnnnnnnnnnnnnnnnnnnnnnnnnnnnnnnnnnnnnnnnnnnnnnnnnnnnnnnnnnnnnnnnnnnnnnnnnnnnnnnnnnnnnnnnnnnnnnnnnnnnnnnnnnnnnnnnnnnnnnnnnnnnnnnnnnnnnnnnnnnnnnnnnnnnnnnnnnnnnnnnnnnnnnnnnnnnnnnnnnnnnnnnnnnnnnnnnnnnnnnnnnnnnnnnnnnnnnnnnnnnnnnnnnnnnnnnnnnnnnnnnnnnnnnnnnnnnnnnnnnnnnnnnnnnnnnnnnnnnnnnnnnnnnnnnnnnnnnnnnnnnnnnnnnnnnnnnnnnnnnnnnnnnnnnnnnnnnnnnnnnnnnnnnnnnnnnnnnnnnnnnnnnnnnnnnnnnnnnnnnnnnnnnnnnnnnnnnnnnnnnnnnnnnnnnnnnnnnnnnnnnnnnnnnnnnnnnnnnnnnnnnnnnnnnnnnnnnnnnnnnnnnnnnnnnnnnnnnnnnnnnnnnnnnnnnnnnnnnnnnnnnnnnnnnnnnnnnnnnnnnnnnnnnnnnnnnnnnnnnnnnnnnnnnnnnnnnnnnnnnnnnnnnnnnnnnnngatcacagaggctgggctgctccccaccctctgcacacctcctgcttctaacagcagagctgccaggccaggccctcaggcaagggctctgaagtcagggtcacctacttgccagggccgatcttggtgccatccagggggcctctacaaggataatctgacctgcagggtcgaggagttgacggtgctgagttccctgcactctcagtagggacaggccctatgctgccacctgtacatgctatctgaaggacagcctccagggcacacagaggatggtatttacacatgcacacatggctactgatggggcaagcacttcacaacccctcatgatcacgtgcagcagacaatgtggcctctgcagagggggaacggagaccggaggctgagactggcaaggctggacctgagtgtcgtcacctaaattcagacggggaactgcccctgcacatagtgaacggctcactgagcaaaccccgagtcccgaccaccgcctcagtgtggtctagctcctcacctgcttccatcctccctggtgcggggtgggcccagtgatatcagctgcctgctgttccccagatgtgccaagtgcattcttgtgtgcttgcatctcatggaacgccatttccccagacatccctgtggctggctcctgatgcccgaggcccaagtgtctgatgctttaaggcacatcaccccactcatgcttttccatgttctttggccgcagcaaggccgctctcactgcaaagttaactctgatgcgtgtgtaacacgacatcctcctcccagtcgcccctgtagctcccctacctccaagagcccagcccttgcccacagggccatactccacgtgcagagcagcctcagcactcaccgggcacgagcgagcctgtgtggtgcgcagggatgagaaggcagaggcgcgactggggttcatgaggaagggcaggaggagggtgtgggatggtggaggggtttgagaaggcagaggcgcgactggggttcatgaggaaagggagggggaggatgtgggatggtggaggggctgcagactctgggctagggaaagctgggatgtctctaaaggttggaatgaatggcctagaatccgacccaataagccaaagccacttccaccaacgttagaaggccttggcccccagagagccaatttcacaatccagaagtccccgtgccctaaagggtctgccctgattactcctggctccttgtgtgcagggggctcaggcatggcagggctgggagtaccagcaggcactcaagcgacttaagtgttccatgacagactggtatgaaggtggccacaattcagaaagaaaaaagaagagcaccatctccttccagtgaggaagcggggccaccacccagcgtgtgctccatcttttctggctggggagaggccttcatctgctgtaaagggtcctccagcacaagctgtcttaattgaccctagttcccagggcagcctcgttctgccttgggtgctgacacgaccttcggtaggtgcataagctctgcattcgaggtccacaggggcagtgggagggaactgagactggggagggacaaaggctgctctgtcctggtgctcccacaaaggagaagggctgatcactcaaagttgcgaacaccaagctcaacaatgagccctggaaaatttctggaatggattattaaacagagagtctgtaagcacttagaaaaggccacggtgagtcccaggggccagcactgctcgaaatgtacagcatttctctttgtaacaggattattagcctgctgtgcccggggaaaacatgcaccacagcgcatctcgagtcagcaggattttgacggcttctaacaaaatcttgtagacaagatggagctatgggggttggaggagagaacatataggaaaaatcagagccaaatgaaccacagccccaaagggcacagttgaacaatggactgattccagccttgcacggagggatctggcagagtccatccagttcattcaacacctggttagaaaactggggccagcacacaggggaagggtaagctggtttcatgatcgaatcaaggctcagacaatttttaaaggccagagggtagactgcaatcaccaagatgaaatttacaaggaacaaatgtgaagcccaacatttaggttttaaaaatcaagcgtataaatacagaaggtggagggaacttgctttagacacagttcaggtgaagaaagacctggaaacttctgttaactataagctcagtaggggctaaaagcatgttaatcggcataaaaaggcaatgagatcttagggcacacagctccccgcccctcttctgcccttcatccttctttcaatcagcagggaccgtgcactctcttggagccaccacagaaaacagaggtgcatccagcaccacagaaaacagagccaccacagaaaacagagggtgactgtcatcccctccagtctctgcacactcccagctgcagcagagcaggaggagagagcacagcctgcaatgctaatttgccaggagctcacctgcctgcgtcactgggcacagacgccagtgaggccagaggccgggctgtgctggggcctgagccgggtggtggggagagagtctctcccctgcccctgtctcttccgtgcaggaggagcatgtttaaggggacgggttcaaagctggtcacatccccaccgaaaaagcccatggacaacgaaaagcccactagcttgtccagtgccacaggaggggcaagtggaggaggagaggtggcggtgctccccactccactgccagtcgtcactggctctcccttcccttcatcctcgttccctatctgtcaccatttcctgtcgtcgtttcctctgaatgtctcaccctgccctccctgcttgcaagtcccctgtctgtagcctcacccctgtcgtatcctgactacaataacagcttctgggtgtccctggcatccactctctctcccttcttgtcccttctgtgacggatgcctgaggaaccttccccaaactcttctgtcccatccctgccctgctcaaaatccaatcacagctccctaacacgcctgaatcaacttgaagtcctgtcttgagtaatccgtgggccctaactcactcatcccaactcttcactcactgccctgccccacaccctgccagggagcctcccgtggcaccgtggggacacaaaggaaccagggcaaagctccctcagccccattcaaagaggcctggcccacaggctcacggaaagttagcctctcatgccccgagagctgagtgcaagggagaggcagcgctgtctgtgcttcccatgcagaagcacccccctcccacccctgtgcaggccggccttcgcggcagaccaccatacaccacgttccaagccacactgaggcctccctccaagcctgcagcccccatttccagaccctgccagggcaacctgcatatccacctccctaccctgcccccctcttccaggagtctgccctatgtggagtaagcacgtggttttcctcttcagcaactatttcctttttactcaagcaatggccccatttcccttggggaatccatctctctcgcaggcttagtcccagagcttcaggtggggctgcccacagagctcctcagtctaagccaagtggtgtgtcatagtcccctggccccattaatggattctgggatagacatgaggaccaagccaggtgggatgagtgagtgtggcttctggaggaagtggggacacaggacagcattctttcctgctggacctgaccctgtgtcatgtcaccttgctaccacgagagcatggcctgtctgggaatgcagccagacccaaagaagcaaactgacatggaaggaaagcaaaaccaggccctgaggacatcattttagcccttactccgaaggctgctctactgattggttaatttttgcttagcttggtctggggagttctgacaggcgtgccaccaattcttaccgatttctctccactctagaccctgagaagcccacgcggttcatgctagcaattaacaatcaatctcgccctatgtgttcccattccagcctctaggacacagtggcagccacataattggtatctcttaaggtccagcacgaggtggagcacatggtggagagacagatgcagtgacctggaacccaggagtgagggagccaggactcaggcccaaggctcctgagaggcatctggccctccctgcgctgtgccagcagcttggagaacccacactcaatgaacgcagcactccactacccaggaaatgccttcctgccctctcctcatcccatccctgggcaggggacatgcaactgtctacaaggtgccaagtaccaggacaggaaaggaaagacgccaaaaatccagcgctgccctcagagaagggcaaccacgcagtccccatcttggcaaggaaacacaatttccgagggaatggttttggcctccattctaagtgctggacatggggtggccataatctggagctgatggctcttaaagacctgcatcctcttccctaggtgtccctcgggcacatttagcacaaagataagcacaaaaggtgcatccagcactttgttactattggtggcaggtttatgaatggcaaccaaaggcagtgtacgggtcaagattatcaacagggaagagatagcatttcctgaaggcttcctaagtgccaggcactgttccattcctttgcatgttttgattaatttaatatttaaaataattctaccaggaagctaccattattaccacaacttcacaaatgagaacaccgaggcttagaggggttgggttgcccaaggttacagaggaagaaaacaggggagctggatctgagccaaggcatcaactccaaggtaacccctcagtcacttcactgtgtgtcccctggttactgggacattcttgacaaactcggggcaagccggtgagtcagtgggggaggactttcaggaagaggtgggttcccagttggtgacagaagaggaggctgcaaagtgaaggagcaggggctccaggtctggcgacaaccagggaagggacagggcagggatggcttggaccacgagaggcacctgagtcaggcagtcacatacttcccactggggtctaccatgtgaggcatggtgtgggatcctgggaaggagaccaagcctcatttcagtttgcttatggccaaagacaggacctgtgtacccgacaacccctgggacctttaccaaaaaaagagcaaacaccattcactcactcatgttagataaacactgagtgaagtcactggagcccaaggactgtgcgaggtcagcactgccaatacaagaagctgcagccctccagctcgcctccctcaatggccactccgtgctccagccatgctggcttccttttaggtcctccacctccaggctgtagttcatgtgcttctttctggaatgttcttcccaacctacccactcaaccctcagactttaccataaatgtcatttcctcacgtctgccttccctgacctgagaccaagccaggcttcccatgacgagcctcacagtaccccatctcccctgaacagatgcagtaataacctacataacccggggccatgatctatggctttgaatcctggctctgtcactaggccaggtctctcagcccttctgtgcctcagtttcctcatctataaaatgagatgacggcagtgcctgctcatgaagtgtgagttaatgcactcaaatcaatggttgtgcacggtttatatgaatattagtgattacaaaatattatcaatagaccttgtcacaactgttattgaagaactaatcatctattgcttatttaggtctttctctcctgccagaatgtgcgctccaggtggagaggtatgttgccttatccgtggctggatatatagagattcccacactgccttgcacacgagcactgctgggtaaatatttgttggctgcaggaaaacgtgaaggaataggccctccaatgggaggaaaagcatgagttgtgagagcagagccaccacaggaaaccaggaggctaagtggggtggaagggagtgagctcttggactcccaggagtaaaagcttccaagttgggctctcacttcagcccctcccacacagggaagccagatgggttccccaggaccgggattccccaagggggctgctcccagagggtgtgttgctgggattgcccaggacagggatggccctctcatcaggtgggggtgagtggcagcacccacctgctgaagatgtctccagagaccttctgcaggtactgcagggcatccgccatctgctggacggcctcctctcgccgcaggtctggctggatgaagggcacggcataggtctgacctgccagggagtgctgcatcctcacaggagtcatggtgcctgtgggtcggagccggagcgtcagagccacccacgaccaccggcacgcccccaccacagggcagcgtggtgttgagacaacacagccctcatcccaactatgcacatagcttcagcctgcacagataggggagtaggggacagagcatttgctgagaggccaggagcgcatagatgggactctgctgatgcctgctgagtgaatgagggaaagggcagggcccgggactggggaatctgtagggtcaatggaggagttcagagaaggtgcaacatttctgaccccctacaaggtgcttgctacctgccaggcaccctttccataccttgtctcagttcagctccccaccttggataaacaagaaaccttggttgcagaggaaaaaagaggctggaaacaaaggggtagaaatggggtagcaggggagattgcctgatcaactgccaaatggtacacagttctggaaaagcacaaaaaatgtgcacacacgggttcttcccactttaacccctgaggaatctgaggcctgctcctgaaacagactgggcagtggctagtgactctaggtataggagtatccagccctgctcacccaggctagagcttagggggacaagaggaaagaggtgcctgtgggggtggaggacaggaaggaaaaacactcctggaattgcaaagtgagggcagagtctatttatattgggtttaattaactcctctccctggtgccactaaagcagcaatcacactgcagacagcactgatttgattggcaagagatgcaccaggcagaatattaagggaccaggcccctataaataggcctaatcacagcccctcactggaaaatggtaaggaagacattaatcaggcctggcactgtgccctagacctgctcccctaggcactacagtggggcccttggttgcaacacaagtaggtagggatggatgagtgtggcatgaagggcctaggagatttcacttgggtttaaaatgctgtgaccttgagtaagttgccgtctctgaatctgatcctttcgatttcccattctccaaactgagaactagcactgctgagacgtggttatttccaataataatttgtatattttacataacgcaccacaccaacatcttcacccagttggagcctactcctttgctcccgctgctggcttccccagccctcccttctgccctcctcaggccagcacttttcagtgagttcctcctttgcatacaggctttccagatctgtacttgccttgaatactcatcagagcccaggagttactcctcacctcccacttatttttcctcccatcaaataactaaagcatggccagctgatgcccagccaactgagaaacccaaccctctgagaccagcacacccctttcaagcatgttcctccctccccttctttgtatttatactgatgcaagtttgctggctgtcctaacttatttctgtgcctcagttctcccatatgtaagatcacaaagggggtaaagatgcaagatatttcctgtgcacatcttcagatgaatttcttgttagtgtgtgtgtgtttgctcacacatatgcgtgaaagaagagtacatacacagatctcctcaaaaaggaggcagcaagcccgttcaagaatgggactgaatacacctgatgagtggtttactttctgtctgcaaacatctactgatcatctgttaggtgcaggccatgatcacaacaaagacgaataagacactacactagccagggagagtctcaaaaacaactaaactcaaattaaattcattctactccagtcatgggtacaaagctaaggagtgacaaatccctcttggagttagggg[134 bp omitted]catggtgaaactccatctctactaaaaatacaaaattagccaggcgtggtggtgcatgcctgtaatccccgctactcgggaggctgaggaaggagaatcacttgaaccgggaaggtggaggttgcagtgtgccaagatcgcgccatggcactccagcctaggcaacgagggtgaaccaggtccaggaagaaggtgcaaagacagcattccaggtaaaagaaacagcttgaacaaaaagtgtgtaggggaaccgcaagcggtcttgagtgctgagggtacaatcatccttggggaagtactagaagaaagaatgataaacagaggccagtttgttaaaaacactcaaaattaaagctaggagtttggacttgtggcaggaatgaaatccttagacctgtgctgtccaatatggtagccaccaggcacatgcagccactgagcacttgaaatgtggatagtctgaattgagatgtgccataagtgtaaaatatgcaccaaatttcaaaggctagaaaaaaagaatgtaaaatatcttattattttatattgattacgtgctaaaataaccatatttgggatatactggattttaaaaatatatcactaatttcatctgtttctttttacttttagaaatcacatatgtgacttaaatatttcttttctttttctttcctctcactcagcgtcctgtgattccaaagaaatgagtctctgctgtttttgggcagcagatatcctagaatggactctgacctaagcatcaaaattaatcatcataacgttatcattttatggccccttcttcctatatctggtagcttttaaatgatgaccatgtagataatctttattgtccctctttcagcagacggtattttcttatgctacagtatgactgctaataatacctacacatgttagaaccattctgactcctcaagaatctcatttaactcttattatcagtgaatttatcatcatcccctattttacataaggaaatggggttagaaagaccaaataacattttttcaacatcaaaacactagcttgagatcaagcccagacttggatctgtcgtctgaattccaagctttttgttatttattgatatgttttgttgttttcatgcaataatgcaaatcttagcccaaacattttgttagtagtaccaactgtaagtcaccttatcttcatactttgtctttatgtaaacctaaattagatctgtttttgatactgagggaaaaacaagggaatctaacactaaccagcccgtagtgtgtggtcaacactttcgttactttagtatacatcaccccaattgtttgtcttcaccacacactttggagttaggtagtagtatctatttttacaaataagaaaacccaggcacaaaggggttgattagcaattatcttttgaaaagcctgtagttgctcatctgaagaagtgacggaccacctcttatttagtggacagacagtaactagttgagaagacaggggattttgttggcggaaaaaaaaatttatcaaaagtcgtcttctatcagggagttttatgagaaaccctagctcctcagttccacagtgggtaactgtaattcattctaggtctgcgatatttcctgcctatccattttgttaactcttcaatgcattccacaaatacctaagtattctttaataatggtgggttttttttttttttgcatctatgaagttttttcaaattctttttaagtgacaaaacttgtacatgtgtatcgctcaatatttctagtcgacagcactgctttcgagaatgtaaaccgtgcactcccaggaaaatgcagacacagcacgcctctttgggaccgcggtttatactttcgaagtgctcggagcccttcctccagaccgttctcccacaccccgctccagggtctctcccggagttacaagcctcgctgtaggccccgggaacccaacgcggtgtcagagaagtggggtcccctacgagggaccaggagctccgggcgggcagcagctgcggaagagccgcgcgaggcttcccagaacccggcaggggcgggaagacgcaggagtggggaggcggaaccgggaccccgcagagcccgggtccctgcgccccacaagccttggcttccctgctagggccgggcaaggccgggtgcagggcgcggctccagggaggaagctccggggcgagcccaagacgcctcccgggcggtcggggcccagcggcggcgttcgcagtggagccgggcaccgggcagcggccgcggaacaccagcttggcgcaggcttctcggtcaggaacggtcccgggcctcccgcccgcctccctccagcccctccgggtcccctacttcgccccgccaggcccccacgaccctacttcccgcggccccggacgcctcctacctgcgagccgccctcccggaagctcccgccgccgcttccgctctgccggagccgctgggtcctagccccgccgcccccagtccgcccgcgcctccgggtcctaacgccgccgctcgccctccgctgcgccctccccgagcgcggctccaggaccccgtcgacccggagcgctgtcctgtcgggccgagtcgcgggcctgggcacggaactcacgctcactccgagctcccgacgtgcacacggctcccatgcgttgtcttccgagcgtcaggccgcccctacccgtgctttctgctctgcagaccctcttcctagacctccgtcctttgtcccatcgctgccttcccctcaagctcagggccaagctgtccgccaacctcggctcctccgggcagccctcgcccggggtgcgccccggggcaggacccccagcccacgcccagggcccgcccctgccctccagccctacgccttgacccgctttcctgcgtctctcagcctacctgaccttgtctttacctctgtgggcagctcccttgtgatctgcttagttcccacccccctttaagaattcaatagagaagccagacgcaaaactacagatatcgtatgagtccagttttgtgaagtgcctagaatagtcaaaattcacagagacagaagcagtggtcgccaggaatggggaagcaaggcggagttgggcagctcgtgttcaatgggtagagtttcaggctggggtgatggaagggtgctggaaatgagtggtagtgatggcggcacaacagtgtgaatctacttaatcccactgaactgtatgctgaaaaatggtttagacggtgaattttaggttatgtatgttttaccacaatttttaaaaagctagtgaaaagctggtaaaaagaaagaaaagaggcttttttaaaaagttaaatatataaaaagagcatcatcagtccaaagtccagcagttgtccctcctggaatccgttggcttgcctccggcatttttggcccttgccttttagggttgccagattaaaagacaggatgcccagctagtttgaattttagataaacaacgaataatttcgtagcataaatatgtcccaagcttagtttgggacatacttatgctaaaaaacattattggttgtttatctgagattcagaattaagcattttatattttatttgctgcctctggccaccctactctcttcctaacactctctccctctcccagttttgtccgccttccctgcctcctcttctgggggagttagatcgagttgtaacaagaacatgccactgtctcgctggctgcagcgtgtggtccccttaccagaggtaaagaagagatggatctccactcatgttgtagacagaatgtttatgtcctctccaaatgcttatgttgaaaccctaacccctaatgtgatggtatgtggagatgggcctttggtaggtaattacggttagatgaggtcatggggtggggccctcattatagatctggtaagaaaagagagcattgtctctgtgtctccctctctctctctctctctctctctctcatttctctctatctcatttctctctctctctctatctcatttttctctctctctctttctctcctctgtcttttcccaccaagtgaggatgcgaagagaaggtggctgtctgcaaaccaggaagagagccctcaccgggaacccgtccagctgccaccttgaacttggacttccaagcctccagaactgtgagggataaatgtatgattttaaagtcgcccagtgtgtggtattttgttttgactaatacaacctgaaaacatttttccctcactccacctgagcaatatctgagtggcttaaggtactcaggacacaacaaaggagaaatgtcccatgcacaaggtgcacccatgcctgggtaaagcagcctggcacagagggaagcacacaggctcagggctctgctattcattctttgtgtgaccctgggcaagccatgaatggagcttcagtcaccccatttgtaatgggatttaattgtgcttgccctgcctccttttgagggctgtagagaaaagatgtcaaagtattttgtaatctggctgggcgtggtggctcatgcctgtaatcctagcactttggtaggctgacgcgagaggactgcttgagcccaagagtttgagatcagcctgggcaatattgtgagattccatctctacaaaaataaaataaaatagccagtcatggtgtcacacacctgtagtcccagctacatgggaggctgaggcgggaggatcacttgagcttgggagatcgaggctgcagtgagctatgattgtaccactgcactccaggctgggcgacagagagagaccctgtctcagaaaaaaaaaaaaaagtactttgtaatctgtaaggtttatttcaacacacacaaaaaaagtgtatatgctccacgatgcctgtgaatatacacacacaccacatcatataccaagcctggctgtgtcttctcacaaatgcactgctaggcaccacccccagttctagaatcacaccagccagttcaccctccagatggttcaccctcaacttcataaaagttccctacctaatctactgacaggctcatccccgacctaattttaaagatttcctaggagctgcagtgggaatcctggacctcagcctggacaaagaacagctgcaggtcattctcatgtgtggacacagaagctctgcctgcctttgctggccagctgggctgagcgggcctgggaattaaggctgcagggttggtcccaggcagtcttgctgaagcttgccacatcccccagcctcctggatttgccaggatccaagagcatggactttaggaattcctggtggaggagtgaagaaaatgtgacagggtgtcctaagccccgatctacaggaagaaaactggaaataagactgaggacttagtttaagatgttcctactcagcctctagcttttgtgctacagttctgggaacagactcctctctcctgaaaaccacttccctccgcagcattagatttcaccaagatgtcttgcttgtgggaaagacttccaaggatgcctggagagaggaggatggaaatgtcctgctctctaaacagatagacagatgcagccagacagaaaatagtttatcttgctgaggtttctaatgtatttgaaagaggcctgggtctagaagtctacccagagggctctgtgttgtgcacgcaaagataagaaccttccctgtgggagttccagagccagttttcataaacacccatcggtgactgtgttcagagtgagttcacaccatcctgacctgccctgagttagaccttacatggtcttcctcctctaggaagcctctgcagcccaggaacctccccttatcggaaatgaacagcatttgaagcttcaccagacagaccagacagcttagccctcgtgttgtgccatgtgggttgttctctgagaggcaggagagcatagtggttactaggaagggaaggactttgggactagactgcctcggctggagtcctctttctgcttcatagccacgtgatcctaggcatgttacctgtgcctcagttttcactctgtcaatatgtaataactgaatctgtctttgtggtgaggattcagtgagttaacatatttgaagtgcttaaaaatgaggcttgtgtccatagattaatgagtgaatacacaaatggtgatatggacatacagtggagtattagtcataaaaaggaaggcagagctgatccatggcaccatgtgacagaacctcaaaagcattaggttaagtggaagaagccagacacaggtcacctattgtgtaattccatttataggaaatatacagaatatgtaaatccgtggagaaagaaagccgatttccaggggctaaggggaggggagaatgggaagtggctgcttcatgggtacaaggtttcattttgagctgatgaaaatgttttggaactacatagagatagtgttggcacaacatggtgaatgtactgaatgccactgattgttcactttaaaatggtcaaacttatatgaatttcacctccattaaaaaaaaaaaaaaaggaccagatgtggttgctcacacccataatcccaacactttggaaaaaggtgaaagtttttttttctttttttttttatatacttaagttctagggtacatgtgcataatgtgcaggttggatacatagatatgcgtgtgccatgttggtttgctgcacccatcaacttgtcatttacattaggtatttcttctaatgctatccctcccccagccccccacccactgacaggccccagtgtatgatgttctctgccccatgtccaagcgttctcattgttcaattcccacctgtgagtgagaacatgcagtgtttggttttctgtctttgtgatagtttgctcagaatgatggtttccagcttcatccatgtccctgcaaaggacatgaactcatcctttttaatggctgcatagtatcccatggtatatatgtgccacattctcttaatccagtctgtcattgatggacatttgggttggttcaaagtctttgctattgtgaatactgccacaataaacatacatgtgcatgtgtctttatagtagcacgatttataatcctttgggtatataccctaagacctgggacgcatttaaagcagtgtgtaaagagacatttatagcactaaatgcccacaagagacctctgcctgagaacgtgggtttcagcctaagagttgtaatatgtgtgcccattcacaggtgctgcatcagagtcccaggtgggaagaaggcaagcatacacaaaaatggtaaaaggcagaaaggagcccagtctcgttctttttaagaagttttcctaagaatctccacccagcgacttgctctcacatcttcttggccagcactggaccacacaactccttctagatacagaggagtcctaggattctatgagaaagaaggggagggtgggcaaagggcagccagctgtgcagcatctgctggagacacctaacccttggtggaggggttgtggtgctgggagaaggctttctggacggtgtgacagcagagataaacttaaaggccaagtaggagttaccctggtgaagcagggcagggttacaagcattccagcaacatgaagcagcaggagtgttttaattaaaagaaggcagttgctgtaaccaactataaacaaataaaggcttaaacacaatggaagtttatttctcactaagggaacatccaaatccatgatactttaagtcagggacccaggttcctcccatctatggttctgccatcactaatctgggtcttccacaattgccgtgctccttggaggtgggaagagcaggcggaggacacgtgggaggttttagggacaagcctggaggcagcatgcgtcactcccatgcagagtccattggccaatgctggctccgatggccacatctcactgcaggggcagctgggaaatacagtctggctgtctacccaggaggaagagcagccagtttctgctgctgatgatcaggaggtggagaaaatgttcagtcaggcagggagtgggaatagacaagaccacaagcagcttggtgcctctgaaagggagaggggtggaggggagactagagaggtgggtaggaatactggattccactgaccacgtgctggatgtcacgcttagccctcctgctctgtgccgggttaggcacctggtgttttacgtacataatctcaattctgtgagggcatccgacctgtgggaaaagagctgtttgtttcaaatgccagtcctgcttcctaacaagtgtttagagcttaatcgtgttcaaaatacatatacaatgtttaatacttacaagaatttggtggggaaaatattaccatctttcccttttgtgattggagaaaaatgaggctttgaagggtttaagaacttgcccaaggtcggccaggtgcagtggctcatgtctataatcccaacactttgggaggctgaggtgggaggatcgcttgaggccaggagttcaagaccagcctgagcaacatagtgagactttgtctctataaaaaataaataaataaataaaaacaacttgtccaaggtcagacaggcagcctcttagtaagcacacatatcctctatattatactacctctcatggaggatctcctgtgttctacaaatagtctggacttgagccagaatgtgttataatcctgggatcacggccagtgggcttagaagaagccatctctttctcatgccaagatgaggctcccccagatttgctcagacttacctatagtcagcagcatcgggggtcaggaaagacttcacgaagccataaatgcatccttctcggggcagcacctggctctcccaggtgagagaggactccattttcacaggcaggcgtgggagcttcagcacccatctctgggcccagaatgacccactggagaccttacagctctcctgtcacccccaattcctgccccctctgcagccttggaggagaatggagctgaagggcctgccctctgtagggtgagaaagggaggctaaagcctggtgcccactgccctggctgctccgcattgcaggagctgcgcccttcctttcctggcacagggtccacagccccgaaaccccgttgtgtgggagctgggcacagggcagcaggactaatccttggaacagctcagggaggattatcccagccactgtcagcagcggtgcagctggctcattcccatatagggggaggccagagccaggggcctgccacaagttggaaggctggggaaggggaggccagcagaggtgtcctggctgtgggtggctctgagggggctctcaggggtggggctaaatctcaggggcaggattatgtaaatcaaaccaattctagccacagatttaaagtttggaaaaaaaaaaaaacccagcctggcggaaagaatttaaattataaaaacttagaagtatggaatgtgaaatcatcctgtaggtgcttatttaacaacgaaatcatcccgacacaatgagccatatgtgaaaagtcatccttccccaacacatcccccaacaggcactcctcaagcctctcccacccaagtgctggcatcctccctgtcctgcttcacctgagacaccccttgtctcattagacatgcaactacgggaggggtgacaggaagacaagacactatttcctcaggcccagtttggtgtggggagaaagcctcctgatcctgaaagcaagaatttgaccagagcagaagtaatcagtatgcagattgattctgtggtatgttaatgtttatgcatagattatgaggaccaggtgaaaagtgggccaggggagccagatgtgtgtgtgagtcatgggtggctgagatgaggacaggagggaaactggtttggagggtgctggcgatggggtgggggtgccaggaggaagggaggctagttgtttgaatgtctgcatgaaaaagcggacgacagcggggtctgggtgaattcgggcaaccatttggaccgtggagaaaactgcctgcgtgcggctgaggacctgcactattaatttgttttttagctaaggcaaagataaatataaaaactgatactccacccagttaccagaaaacatttaggtatgtgtgagacaacttgggtatgtgaacctaccttttcaatgtaaattcagtgaaatctaagtgcagatcccatatttccaataaaaaggtaacatccaaactcagatgtcctatgagtataaaatacacaaagatcttctggacttagtatgaaaagggattttttttttgtcaggtacctcactagttatttttaaaataggattgcatgttgaaatgataatcttttggatatattgggttaaataaatttattattaaagttaatttcacttaaaaatgtttaatgtagctactagaaattttaaaattaagcatgttgctcaccttatgtttctattggacggctctctctagatacaaaggctgccaagagggacctcactctagcttcagggagaagagaggaattagcaaggccaagcagaggctcctgagggcagggccaagggcggcttggtggggtggggatgggatgcacagagataactccaacccttaagaaggtgtttcctagagcaggctgtgacctgtcagtttatatactgaggcttaggagcctcttggatgcccccagatctgcacccctgaattgccctgtgcccctgccgtctttgttcctgtgctggcatagtggtctcacctccggcagtatcaccaccactgggcacaagcttctccagcacagcaactgtgtcttatttctccttgtactcccagtgttcacaccatgctgcactcacagaagactcttcgttgatattttgtggacagagagaatgcctgtgagagtgggctgaagtgtgcgttgggctccagagaccttaaggaggggagaccaggtcctgagtaaagttgaaggggaggggctgagtcctgctagccaggagtctcatcccctggggaagttccagggacccctcagaagtgcaaggggacggtgttagtgttagtccagtaacacagcccagagcctgccttccacgtgggtttgacaggagcctcctaactgctcttctgcttccatttttgccccttcagtctattctcaacagggaagccagaggcatccttaaccatgtcagatcatgtggctcctcagctcaaagcctcatctcagaggaaagctctggtcccttagaaatggcccaggtggtgacagacagactctaaggtgagcagactgttgctagatatctgggctcggaggactcgccactgctcaaaggcagtgaggattttcgcactagaagctggaggacagggatccttgttaggtaggagcagaaagcttagaaaagtggtctcctgcagttacgtggcaaacacatcatgtaagtgataaattgggtatgcagttgaggagatttccaagtaaaatgttgaggatgctgcctggtttcttcttactgcttataatatagtgtgagagaagagagataaattgagaaagagactggtttttaaactgttaaaattgaatcaggacttgatgattttgaaaattgtcagtctccccacatggaaaaagatgctgaaattaacaaatggcttctgagcatgtggcatagggtgtaactgtacagtcttttgtgattatgcataaagatcaaaggatgggagtagcaatgagtcacacagaggtctgttgcaagagattacaagggtgtaccatgcagaacctctccaccaaaccttagggcccttgggaagcttcagtgagttaccctgggggccatcttggcaggagctgaaggtagaaaggtagagtttatctctaaaagattcatgggtatggctcttgacaaatcgactatgagccccactgaaacccacagaggacaggcaaagggtttgggaaagctgtttcacccacagtgctggcagattggtctgtaggggacagagtgcaaaatgaaagaagactgtcagagaccccaaactctgctgtcaagaagaaggctgataaaactacttggctgcaaacacgtggatctttcgtgagaaaagaaggatgacccagaggcagaagcccagaaggcagagccaagagacatggaatcttcccacatcttaaaacctgtttagggaacaccagcgtctgtccagctggatttcagaaccaccattccttcatccctcccctgctgcctctttctgaacagcaatgtctcaagctttacccaccattgtgtgttgcatatgtagggggcagatagcttgtatctttagttttccagatcagaggaacatccaaagaaatctgttctacacctaaacccgatttagatgagattcgggactgtgagcatgaagggatctcaagaggggtgaatgtgttttgcatgcacaagggacaggagtcttggggacagaggacaggctgtggtggcagatactaaggtgacccccacaacccccacctctgccattcacacccttgaataatccccttctctggttgtaagcagaacctgtggcttgcttatgaaggaggcggtatatatgtgattcatgtactgatcatattgtataagatcactggctggatgcagtggctcgtgcctgtaatcccaacactttgggaggctgaggcgggtggatcacctgaggtcaggagttcgagaccaggctggccaacatggcaaaaccccgcctctactaaaaatacaaaaattagccaggcatagtggtgcacgcctgtaatcacagctactcaagaggctgaagcaggagaattgcttgaactcaggaggtggaggtggcagtgagccaagatcgtgccactgcactccagcctcagtgacagagcgagactctgtctcaaaaaataaataaataaaatgttaagatcataacctgtctttctggggactctctcttgacgcctttgaagaagcaggctgccatgttgcaagctgcctcatggaggggatcagctgcgaggagctaagagccccctccagtcgatgctcaccaggaagctgaggtcttgtgtccagcaccctgcatggaactgaatgctgccatgtgagcttggaagcagagccatccacacagctgagccctagatgagaacccagtgctggctgacaccctgatggcaccttacagaggaccagttaggctgtgccaactcctgacctgcagaagctggggaacattgggtcgtatttgcagctgctggatttgtgggaatttgtcacacagcaattgggagtcacacagcctgtgacgccccaacaatccacacctcctgcatctccctgccttcacttcctagcacactgccctgactccctctgccgcagccacgctggccctctgctgttcttcgaagccaccagggctgcattggctcccagcctttgctctcactgctttctcctcctagagagcccttcctgcatgtatatgtttgactcactcccttgcctccttcagacttgtacttaaaaatctcagtaagcatttccctggctacccttttaaaaattgcaacccacttccatccccatccccaacatgccatatttcctttcttcttcttccttcttcctttttttttttttttttttttgacacaggttctctgtcacccagcctggagtgcagtgacatgatctcggctcactgcaacctctgcctccccaggcaagaaaaggggaggatgccaataaaggatgcattgatttgtatttactacagtggacatcaagggcacattcttgctgtggccatcaagagactgtataaattctatgacttgtagttgtcccacttaagaaacaaagaagctgtgcatttctttactggtctagagctgctctagggcattttctctacagcaattctaggtttccccaccttgtgagtttagctttttctatattcaaagaaaagtcctcagccagagattctcaggagcttatagaacaatccaaactcttgggaatattaagtggagaggggtacgtgcaagacaccaacagcactagaaacagtccacatctttccatgcgtggaggagtttatgctctatgtgagttcactccatcattaattcttcaaacacaagagtgttaaaggaacaagagttaatgggtcctgtcattacacttgttcccaggatgacattcttcatcttcctcttctacaacctgttctatattcccctcatgtttatccagtgcttctgctagtctagttcacttccaaagacccatgattaccatggccctgtcaggctgtaattgctgcaatttccaatttacaattgtcatcatctatggttgataaaggtatagcaatatttctatttcctcatgataatgaaggtcaattacaactgccagtataataacttatttctttgtctgccaacctacatacacaaggaagccaaaatgacagggagctactaaaactttattcttattggaatgcttactatgtacccagaagaagcattctccctactccagcagagcttaatgctgtaggtccaggaagctcaaattctccaagggagttttagtgagaggagccactctcaccctctgcccttggtttacaaacctgtatattctaggacccaatatcttacaatgtccattggttcaaagtataacatgttaaagcacagagccccaactctgaaaagtaccatccctaaattggcatttagttgcacctttatatccacctttaaaagaaatatcttttaatgttctatcagactgatagattctgtttaatatagtatattatagcaccagtggatcatttggttgtatgcatattattgtaccttctctgctacaaaatatattcctttgtcctaaggtgtgttacaaagaacattaggcattctatgcatctttggatagtttaatggccaaggcattgatggcaggagagtcaaagccacaggtggaaaacacatttatcccagtaagaacaaattgctattcttccactgtagagagggtaaacaatgtgccattacgttgccaattgaatgcctcaatcatgtcaagggctgaacatctatgactgtttctgaaaggtcaaacattcaacagaggctgtagctagaactgccttaatgataagagatcatgctgaattacccatgcaaaaccttaatacttgacacttatcactactttattcaagagcctattgtgcaagcataagtggctgagtcaggttctcaactctgctcattaatactatgcttggagtatacagtaagataagaaacataaataagaagtgtacatttgtttcttcctgttttcttctggctattggatcaattacatcccatcttaagctgacccctgtgtaattaatcaatatccgttttaagcagcaatccatagttgtgcagaaattagaaaactgacccacacagaaaaactaattgtgagaaccaatattatactaaattcatttgacaattctcagcaaagtgctgggttgatctctatttacgcttttcttaaacacacaaaatacaaaagttaacccatatggaatgcaatggaggaaatcaatgacatatcagatctagaaactaatcaattagcaatcaggaaggagttgtggtaggaagtctgtgctgttgaatgtacactaatcaatgattccttaaattattcacaataaaaaaaaagattagaatagtttttttaaaaaaaaagcccagaaactaatctaagttttgtctggtaataaaggtatattttcaaaagagaggtaaatagatccacatactgtggagggaataaaatactttttgaaaaacaaacaacaagttggatttttagacacatagaaattgaatatgtacatttataaatatttttggattgaactatttcaaaattataccataaaataacttgtaaaaatgtaggcaaaatgtatataattatggcatgaggtatgcaactttaggcaaggaagcaaaagcagaaaccatgaaaaaagtctaaattttaccatattgaatttaaattttcaaaaacaaaaataaagacaaagtgggaaaaatatgtatgcttcatgtgtgacaagccactgatacctattaaatatgaagaatattataaatcatatcaataaccacaacattcaagctgtcagtttgaatagacaatgtaaatgacaaaactacatactcaacaagataacagcaaaccagcttcgacagcacgttaaaggggtcatacaacataatcgagtagaatttatctctgagatgcaagaatggttcaaaatatggaaaccaataaatgtgatatgccacactaacagaataaaaaataaaaatcatattatcatctcaatagatgcagaaaaagcattaacaaaagtaaacattctttcataataagacatcagataaaacaaattaggaatagaaggaatgtaccgcaacacaataaaggccatatataacaagcccacagctaacatcataatagtaaaatcatcacactggtaaaaaaaatgaaagcttttcctctaaggtcagaaataatataaaggttcccactcttgctatttctattccatatcgtactaaaagtcctagccaggacaattagacaaaataaaaataaaaacacccaaattggaaagatagaagcaaacttttctgtttacagataacataatcttatatgtagaaaccccttaaaacttcagcaaaaaaaaaaaaaaaactacagagctagtaaattcagtgaagttgcagaatacaaaatcaacatacaaaaatcagtagtgtctctatacactaataaggacttaacagagaaagaagttaagaaaacaataccactaacaatagaatccaaaaaataaaatacttaggaataaattttaccaaacatctgtacactaaaaactataaaacattgaaaaaagaagttgaataagacacatataaatagaaagctatctcatgttaatagattagaaaaagtaatattgttaagatgtcctcactacttaaagcaatttatagatctaatgcatttattgcaatctcttcaaaatcccaaaggtatttttgacagaaataaaaaaaaaattctaaaatatgcatgaaaccacaaaagactgtgaatagctaaagcaatcttgagcaagatgaacaacactggaagcatcacactaccttatttcaaaatctactacaaagctatagtgatcaaagcaacatgatactgtcataaaaacacacagataaacctatggaatggaataaagagcacagaaataagtccacacatttacattcaattgattttcaacaacaatgtcaagaagacaatggggaaaagacaatctcttcaataaatgatgctggaaaaactatatatccacatgcagaagaatgcagttgaatcctgatttcataccatatgcaaaattcaactggaaatggattaaatacaaatttaaaacatgaaatggtataactattagaacaaaacatagaaaatattcttcctgacattggtttgggccatcatttttctgatatgactctaaaagcacaggcaaaaaaagaaaaaatagacaaatgagactatgccaaattaaaaaatttctaacaacaaaagaaacgatcaatagagtgaaaaagataacctcttgaatgggagaaatatttgcaaactactcatccaaccggggattgatatccagaatatacaagtaacacaaatatgtcaaaagtaaaataaataaataaataaataaataaataaattaaataaattatttaaaaatcggcagaggacaggaatagacatttctcaggagacaacatacaaagggccacagatacatcaaaaaatgctcaacatcactatttgtcagggaagtactaattaaaaccaaaatgagatgtcccctcaaacctgttagaatggctattatcaaaaagatgaaagatagcaactatcagagaggatgatagaaaagggaacccttgcatcatgtacaaattaaaaatagaactatcacatgatccaagaatcctacttctgggtatatagccaaaggaattgaaatcaatatgtcaaagggatatctgcactcctatgttattgcagcatgttcacaatggccaagatatagaatcaacctaactgttcatagacagatgaatggataaatgaaatgtgatatggaaaattattcagccttaaaaacagtaggaaattctgtcatttgagacaacgtggatgaacctagaggacattaagctaagtgaaataagctagacacagaaagacaaatattgcatgatctcacttagaatctaaaaaatctgaactcatagaagcagagaatagtatgatggttactagggttatctggcagggagaggatgaggaaatgggacattgttaataaaaggaaaaaaattcaattagtaggattacattcaggggacccaatatacgacatgttgactgtaattaataatgtattgtatgcttgaaaattgctaatacagtatattgtaaatgttaatatgaggtaatatatgtgttaattaacttgatttattcattcaacaacatacacatatattaaaacatcacactgtattccacaaatatatataatttttgtcaattaaaaaataatttttaaaaatgagaaacaaaaaagctgacattttcagattaaaaaaattatacagaagaattaattcattaaagtaaaaacaaatgtgggaaaatggtttttaaatataatttaaaccaaatttaaaataagcatataaagactatggacaaaacaagaaatccaaataaaaaataaacatatgaagaatattcaaactcactttttatcaaagaaatgtaaattttaaaatatagcattgctattgtgttttcataaataataatatatcatggatgagcctgtgaggaaacagacactcatactctgcaaagcaatgactaagataattatgtcagatcatgaattacgttaattagcttgatggtggtcactgtttcacgataaatatacatatgtatcaaaacatcacattacacaccataaagatatataacttgttatcaaaaagaaatatagcagttaaaatttaaaatttttaaaaaacgtctttttgaggttcgtacctcacttaagtcacactgttcaaaatattcatgcactcatttctctcattcatgtgttaatgtacagggtacgggccactataaattccttcagcaactggaaaggaaactttatgtactgagtgctcagagttgtattaacttttttttttttttgagcagcagcaagatttattgtgaagagtgaaagaacaaagcttccacagtgtggaaggggacccgagcggtttgcccagttgtattaacttctaattcaacactttaagattcttagcattattgcagacaacatcagcttcacaagtgtgtgtcctgtgcagttgaacaagatcccacacttaaaaggatcctacactttttttaatgctctgctgtttctgccttgaaattcttaacaatttttttaaccgaagtcctcacaaattcagtttacattagccctgcaatcatgtagacatcctgattccagacaatgtgtctggaggcagggtttacaggacttcaagaaccttaccttctcaactttcatctgcatctttactcccaactatatatgaagatgatgaagatagatatggatggtgcttctaccataccctcttcctctgccaaacttccttgatctaggataaggtcagtaaacttcttccgtaaaaggccaaaagtaaatattataggctctacaggccctagagtgtctgtcataactactcaactcttattgtagcataaaaactgtcaacagacaatacagaaacaaatgagtgtgactgggttccagtgaaactttatttacaaaagatttgtcccatgagtcaaatttaccacctccagatctagagaaacacttttgagcccttttattttgctcaacagttaagcatggctccatgtcccttatatttagtcagaactcggtatgttttaaggaaagaatggttacacgaagacatacattcattcatttatacaacacattttcagtgttgaatgataaattttggaatagttaacagatgataaaagtgttggtttcagtcatccctatccaatgaagtaaaaaaaaaagtgttgaatgggaagaaatcaagaatagttatacgaatatcaccattgcattaaagctctcttccttgtttctaaaagaatatcttgacacacattaagctcactgacccccacaccatgaatgagggcatcttcaacaatggtggatgacgtcttagtttccctcaactcagttaatctaagtaagctcatggtatcactttcctgtcctagagggaacatatttcctgcatttttctttttttccttactttccatcaccaagtaactcttctgatattttttctcttgagaaaattaatatgactcatagatctggttcccaagagaaaccaatggaggcctggttacaaggatctaagaagcaccagtgggtctctaacatctagtggtactaattaactctgttaatcattgggaagaaaatgtatacatacttttgtcttggagctgattctactagaaagcagaaatcaaaatgatcagtttcccagtgtcactactgcacaccctggaacagaacaggtaggtcagaaaaacgctcccaaagtttagcaatgtcaaggcaatctctctcttcttacatttcccttcaaccttccatctcctccacttttctgttttcctcctatctccaattatttcaatcctcagagcattattcttacaatcttaatcactaaattatattacacccgttaaaggagagatttctaaatgcattgacatttgtactgtctctctttggagaattagtattataaggatctgttatctcttgtcaccttccttatgtcatatgatatgtcacatttcccactgcggagaccaaacatgttcacgtcgtgtgcgttccattttcctaatggaaagtggggggaagtgattttctgtcctcatatagagaatgctggggccattccctctgtatgccatatttgataaagcatttgataatcttagtcaatgcctgggccaagaattaaaggggtaattatcagaatgaaaatggtttaatgaaactgtgtctatcagttctgaaaagggcctctatcacaatgaactaaggtagttatgaatagagctaaaacttaggcaacaccatcctggacataggaacgggcaaagatttcatgacaaagacacggaaaccaatcacaacaaaagcaaaaattgagaagtggaatctaataaaacaatagcttctgcacagcaaaagaagctaccaacaaagtaaacagacaacctacagaatgggagaaaatatttgccaactgtaagtctgacaaaaatctaatatctggcagctataaggaacttaaatttacaagacaaaaacaaccccattaaaaagtgggcaaagaacatgaatagacactctcaaaagaagatatacatatggttaacaagcatatgaaaaaaaagctcaatatactgagcattagagaaatgcaaatcaaaaccatattgagatatcatctcataccaggcagaatggctattattaaaaagtcaaaaataacagatatcggtgaggttacagagaaaagggaacacttatacactgttggtgggactgtaaattatttcaaccattgtggaaagcagtatgggatggcgattcctcaaaaagccaaaaacagaactatcattcaacccagcaattccattactgggtatatacccagaagaatataaatcgttctaccataaagacgcatgcatgagaatgttcattgcagcactactcacaatagcagagacatggaatcaacttaaatgcccatcagtaacagactggataaagaaagtgtggtacagatacaccgtggattactatgcagccataaaaaagaacaagatcatgtctttgacaggaacatggatggagctggaggctactatccttagcaaactaaggcaggaacagaaatccaaataccacatgttctcacttatgagtgtgagataaatgatgagaacttacaaacacaaagaaggaaacaacaggcattggggtctacttgaggacgatgggaagagggagaggagcagaaaagataactactgactactgggcgctacctgggggatgaaataatctgtacaacgaacccccaggacatgagtttacctatgtaacaaaccttcacatgtacccccgaaactaaaataaaagtcaaaaaaaaaaaagaaaaaaagaaaaatccatgcatatgatacatcagttaacaaggcactggtgaaattaattttaagtattattgtctctttgtgtttttggtctcagaaaagttacgatttcccttagttccttagggcagagagaatcttcaatcactgaagtcaggagacacacattctatctgattttctacattatctgtttgaaaaggttacccacttattagtgttaaagccaagatatccagcaaggatagcaaccaactcttaaggtactctcccttaggaggattcctgattctttaatgttttctaaaaaagcaaaacaaacaaacaaacaaaacaaaacactaaatgttttctctttcaacttatttgaatacactcttttctcactgctctgagcatgaattcaatatttcagggcaaactaactgaatgttagaaccaactcctgataagtcttgaacaaaagataggatcctctataaacaggttaatcgccacgacatagtagtatttagagttactagtaagcctgatgccactacacaattctagcttttctctttaggatgattgtttcattcagtcttatctcttttagaaaacataggaaaaaattatttaataataaaatttaattggcaaaatgaaggtatggcttataagagtgttttcctattgttttcagtgtaggactcactgttctaaataactgggacacccaaggattctgtaaaatgccatccagttatcatttatattccctaactcaaaattcattcacatgtattcatttttttctaaacaaattagcatgtagaattctggttaaaatttggcatagaacacccgggtattttttcataatgcacccaataactgtcattcactaattgagaatggtgatttaacaaaggataataaagttatgaaaccaatgccacaaaacatctgtctctaactggtgtgtgtgtgtgtgtgtgtgtgtgtaagagggagagagagaaaatttcactccctccataaatctcacagtattcttttctttttcctttcctttccttgctcttctttctctcctattgctttcctttcatttccttctcataaaagaaaaataacaatatagaaaataacaaaatatagatggtcaacctttttaatattaaggttacctaaaatgccattatccaaagtggttctctagagatgctgatgtatatacttacatattttacagtgtattcaaataaagagtatattacataagacatatccttttgtaaccaacttttgtcattaacaatttactggacttgtcaacaaacctaaatctgtatcgtctataatggctacgttcattttggtatgaatcttaattacccctttctgcattatttaatgattttctcatatgtcactcttaaatgtacttctaatttttcactttacatcacataatgaatggatccaaatatgttatggatagatatcttcaaactttctacttacaagtagtgataataacagatgttctctctaaagtgtagttggtatcaattttactgacctttaaaaatatcttaatgggacaaagttcaaatatttgatgaccagctatcgtgacctttatctctgtggctctgtgggcctgtagtttttacgtgcttttagtgtatcatgattaaatattttgttttagtaaagacaccattatttcccaacttcatattcaaattgtcaaaggtattaatcctagagcagaactctcaaaagcaccaactctgattcctaacaaagcatggaaaagccctctctctgagtttcagatactcttttttgtgggggttgagtttcactttatttaaagtgagtcttaatcctccaacaagtcaacaagtgattggctggaatcacacgtattggaaaaccagcagaagagtaagtctttgcattttatgctactgtacctctgggattaattgctctttccctcattggccagtcactcttagtgtgtgattaatgcctgagactgtgtgaagtaagagatggatcagaggccggg[131 bp omitted]gggcgcggtggcgggcgcctgcggtcccagctgctggggaggccgaggcgggagcatggcgggaaccgggaggcggagcttgcggtgagccgagatggcgccaccgcactccagcctgggcgacccagcgagactccgcctcaaaaaaaaaaaaagaagattgatcagagagtacatcccctaagggtacatgcagataaatacaattaaggcgattaacatttcaaacacggtgactgtttcttacgtggacgacgttgtgttgaacatgggtgagtaagactgaagcagccgtaattactgcacgatgcgcatggtaaagaagcactccgttacggaaattatattctttgcccctctaatccttcactccacctgccattttcccacatgatttttttctttgctgttcttgtctaattgttattaataattaataaataacttatgatctaattgttattaataattaataacttatcatcacatgatttattaataaattaataaataacttatgatcaccgcatttccccaattcatttatctttctttcattttctctctttgtgtgttttctgtcttcatatttcagcacttgccacatatttcccacaaaatcatttatggtcaaacaacacttcaacgtgtagcatttgtatttctcaattcttcctcactttcttccttcagaatactaaagcttcttctctactgactgagtcaatggccaatggatagagtaaataattctgcggtatctaaatttgtattgattggactttcaagctcttgggagatgcatctttttcttttttggttcttctctgtgttctacatgggaattatcctggaaaatctcttcattgtgttcacagtaattattgactctcatttaaattccccaggtactgcctactggccaacatttatcttcttgatctgggtcttctcctacagttctgactttttcactaactgcagcatcatttcttttccaagatgcatgatacagatatttttcatttgtgtcatgcgtaaaaattgagatggtgctgctcataaccatggcatagagcaggtacactgccaatctgtaagcctccccattacctgaccacaatgaaccccaaaatgtgtgtttcctttgttggaggcatcctggatagtcaggataatccatgctgtatctcagtttgtttttgccataaacttgcctttttgtggccctaatagagtaggtagttttcactgtgattttccttatgtcatgaaacttgcttgtgtagatacttacaaactagaggttgtagtcactgctaacagtgggcttatatccatagctacctgtttcttattaataatatcctatattttcatttcggtaaccgtctagaatccttcttcaggagacttatctaaagcatttgtgtcatgttagatcacatcacagtagggattttgttttttatgccatgtatatttctctatgtgtagcctttgcctaaaacaacacatgattaatatttgttcattgttccttttgctatcacccctgtctaggatctacacattaagaaacaaagacatgaacgtctccatggaaagactgggaaaatggattgcaggttctagcaggatgtcataataaatggtgcatatccagagtgcaagatgattcagtctcaccaagaacactgaaagtcacatggctaccagcattattgtgataagaactactattttgggagatagtttagcaaaggtgccatgtagaaattgattaagtcagaggtatctttaacttgccaccacagagaagagattaatttcatatacttccattgagaagagagataagaatacaaaaccaagctgatttgcaggagtaaacttgatattcaaatactatttcctgaatgacattttctgagacatgctaattgtaattactttcagcttcaaaacataataaatttatctcatagtaagcatatagatggaataaataaaatgtgaacttaggtaaattataaattaataaagtatatttttaaaatttccattttactttctgtttaaattagaataagaaacagaaacaactatgtaatacgtgtgcaaagccctgaactgagatttgactttaccttgagctttgtcagtttacgatgctatttcagttttgtgctcagatttgagtgattgcaggaagagaataaatttctttaatgctgtcgagactttaaatagatacagacagagcattttcactttttcctacatctctattattctaaaaatgagaacattccaaaagtcaatcatccaagtttattctaaatagatgtgtagaaataacagttgtttcacaggagactaatcgcccaaggatatgtgtttagaggtactggtttcttaaataaggttttctagtcaggcaaaagattccctggagcctatgcatctgtggttgatattttgggataagaataaagctagaaatggtgaggcatattcaatttcattgaagatttctgcattcaaaataaaaactctattgaagttacacatacttttttcatgtatttgtttctactgctttgtaaattataacagctcaattaagagaaaccgtacctatgctattttgtcctgtgactctccaagaacctttctaagttattctacttaattgctttatcactcatatgaatgggaatttcttctcttaattgctgctaatctcccccatcttcatatactctaccgggcttctggaacaccacagcttcctggctttttctcctacctcctgggcaagtccttccctgtgtcttttgttgagtgttcctcatctgcttaaccaccaatcaacctattgcccctaatttgatctttggcctgttttcacttagattctatccctacgtatcacccattcccacagctttaattaccatctaaacactaggggctctcaaaccttctattttttctttctttctttctttcttccttcctccttttctttccttttctttctttcattctttctttcttttttaaggggcagggtctcactatgttgctgaggctggtctcaaactcctgacctcaagcaatctgtctgcttcagcctcccaagtagctgagaatacagggacaagccattgcacctgaccctggtactatttcttgagttcctgatccacagatctaacctcctactttcctggatgccacacaagatcttccactcaacaagtctgcaactaaactagccttcctcttttcaaacctactcttctttcagtgttctcagtcacaataatttgtaccaactagttacctagttgcacaacccaaaatctggggaaaataatagatttctttctccatagtaccccaaaatcaataaatcatcaagtcttattctaccttccaaagagccttacatatgttcctttattttcatctgtaacaccactattcctgtctaagcctacctatgtcatttttggaagagaatatagtcacctatgcgatcttcccacttaaaatcctattatctacgcttcagtaaaagaaaaaaaatttttaatctaagtatgtaattcttttgctaaagacaattcacatgcttctgtgcccttaaactggtatgttatcatggtatagtaggccatccaagacctggcttccttcctttttttcagtctcagagaataacatactctttccctgcaactccagatccaatttggttttcttttacttgcctggaaacttcaaattctatcaactctggggctttccactagctaatcattttgtatacaatatttgtccttcatgttttgcctcttaacatctcagctttcagtttcatcattttaccagggaggcctcccagaacctgagtccagaagagttccttccattgtatattcctctagcactacctattacctcttttgtaagactaacagccctcaaaatttttcattcagtgatgtcttcctcattgcattttaagttcaacatgagcaggactttgtcatgttcacctctatcacatcataaatatagcaaagagtaaaactattgcaacatgactaatgtattgaacgatgcttcagctttcttcttacgttcaatcacaggtcatacgactaaagaacttcctttttaatctccttttctattctcaattaatttcctctgcctgcatcacctcaagtctctggggtgaaatccactaatgaattccttttgcagcttaagccaattccaatcttgagccaatctcaggtgaagaagcctgtaaattatcactctcagtcctctcttgtactactaggtctcatgaactcttcattaacaactccagcttctctgttagcccaaaagccttttgctgcctagaaaacccatgattcatgcctcaggaaacagccttcaaatcacaacatgttctgtatctggctggccaactccctgcaacttatttctgcctagatgctccctcattcatttcaatacgctgttcggcctgctaccccagtttcccacttagaacaatggcacacaggacaggagcacattggcacatcagaatgacttatgtactgctcattgtgttgcagaagagacctctgtgggggcaatagaacagattttcctctcacgtcactgtagttgtggtttccctaagcacctacactgttttacctcatcttaggtagacaataatccatgtaactgactgtgtatcctaattttaaaaaatatttctgcccacattattctgcagtttttatcttgcttacgtatttttggaatgttactatttttcaaaaattaatttgggatcaaccaacatttcttattctgctgctgttctagagaaaatcattttcctcatttctgaacaagagaaaatgaaatacagctctaaacaaatgccactgtaaaccaaggtggagcctttgcactttcaggccaccatgataacctggagattagatttttctgtgtctttacatcaataataaagccaagcttctccaggggtatccactaggcttgtctcaatggctcaatacaggtccttttgtgaatgattacctcaccctcatggaaacacactcttgttacagaaactcagaatgattctattttttcttttatatttgtatatgtttttccaatacctctgaaaaaactgatccaaaaaaaaatacaaattttaattgtagccagtcaattcaggaaggacaaaggtcaaaaactttcaaagaaaccttcaaccccaacacactaaactttgggagcacaggttggcatccagaggtaaacatttgctataactgataacaggagaaggatccatttattcacctgttatcaattacaggcattgtatttaaagatcagatgttttatatttatttcttcaaatttcattcatggtgccataagtgaaggtatgtctgtccaccctgaatatattttcactccctcatctcagtcattccgaacaattcacacactaagattacccatgctaaatggggattcttttttactagccaatgtagtacctcaaatccttccttccttccccctatttcatcagcaggcaattcttttgatacttttgtcaaggggaaattgtgtgactcagagatctagtccccaagagaaactaataatgggctgggtattgtctgtctcagcagcatcagtgggtccctctcctgtgcagctaattagcttcctttccaatatgaagaatcttatatatagctttgtctttggggtattacataaatgaagattaagctatctgaatttctccttctcctaaaaatgcacatcctatgactgaaaagacaggtaaaagagatgcttttaattacaaaaccttccctgtcgtggttgcttctctctatccttctaaactccctttcaatttcttctcttctgtaacatatttgtgcccaaaatcttctgctttctgaaatattttatctttttcttccacactatctcttattttcaaattttaatcattaaattatattatgtcttataaaactaatcccacatataaacccctatgataatttcagtttgtccctagtatgaagttctttaaagatgtgtagttttctaactttcatgctctccaattcattataaacttcattttccactctgaaaaggagatgtgtgatctcgtctatttccatcctatttgaaaaccagatttagttttaaaccagaggaagggaatctcaagtctttacctcccacagtctggtgtgattctctctcttttggtattaccttcctccacattggaacactccagccaatgcataggctgagaggctatctcagattcagaaagatttggcctcatcccaggggagggtacagaggagctgatggctatgaattctgaaatggaactgttccaggttgaagaaataagaaagggaattgggaagagcaatgcccagtgaaaaagaagaaataatattttaggaagtgaatgctaattttattttaaacaaaataagaactcaaggaataagagggttcttccaataggttagagtgatcctgtcaaacatatatgcttctagatttttttaaagactgtttctaccaagaaagcatagaccactattgagaaagatcattaaactggaatttaggaggtctgccttctgattctgacttcttgaatgtattgttagccatttaaccacactgtgttgtttctcattctacctgtagaatctcaaagttctttcccacttctatacaaaactataattctgaacatcctttttgtttaatataagtctgcatttcctgtttgaagatatgtgtcccagaccctaaatgactgacaaattttaaatctccaataggaaagatgacaaactctatggaaacttggcttctgaagaactcctagaagctttccaaagtcatcagtgtttcctaagaaggcagagaaatcaaacacatggtcttttcctctagacaagctcctttgggtcatcaggatttcttcaacaataaaatgtaataattccaaatgtttgtaacagaatgggtaggactttcttcacttatttaaatactcccttttttatgcaactgagttttcatcaacaagtacaagcttgtgaaggagtactttaaaatgcaatttctctctatttttgtgggggctaatattttatttctcatattgacaatttattatgctgtttttagaaagttcattcatcaagtatttcttgagctttttctatgagacaggcactgttttaggcaagtaattatgcactgaacaatgcaaaaagtttccctgcactcatggactttaattttacatttatgaaaagctacaaatattagaataagtaaaatactgcctggaggctaaagcatattttgatcacttattccctaattcttttagaagagaactcacctgttggttagctgaaccactgccagtgatatccaactatacattcaatcccaccatacctcattatcacacttattcactcacaagcttaaactcttaacttttctccacatatcagtgactatttcctacagcttttcttttactttccatgtttgcagtgacaatatacataaacagtgtatgaaaactcaagtaaaatctactctctcaggtgttcataatgcatcaatgtatattgctttaagcctgaaggtaacctaagtaaagatgtaccatgttccaccaatgcttcttttgatcatcattttatcctgttttttctttaggattctttcttattccttcccctgacccttcttttattctccaaatttctttccaattcatctttgttcttccctttcctttttactctctttaaacattctatggactctgcctccttcacactgatattgaacgcccatagtttcatattttggattgcgattgttttattttaaaatggcaaatgttcatgttataaagagaatttttcagtctttagactaataggttcatgtagtttgggattttcctctttaagaaaattaattatcactcacactccaagacaaacaccatttcagtagcaatatgaatttcagtagtaataggaatctccaaatatgacaaagtaattcagacattaattgcttttgttttggaattgctcttataagatgaaatatcactttcatgatgagagtcctagagtgcttggtttatatattgtatcttagttttaacaggataaaacacttgatcctaagcagtaaacatgattcttcagcttcaacttcatttctttataaataactatttatgaattggtgttgagcttagcaagtcaccaaacaccttctgctcagcagcataaaggacatttccatgaaacctcccagggataatcttatttactctataatgtttcccgggttcaattcctctcccaaaatcctttgttcttaagcccctatgatctgggtgatctaaatatgggtaagaagtccagggatagcactatgaatgaagtgaaaatagtaaaacatagttaaaaatgtacagatgctctctgacttataatagggttatgtcctgataaatccatcataagtcaaaaatgcatttaatattcctaatgtacctcacatcatagtttggcctagcctaccttaaatgtgctcagaacactttcattagcttatataagatcacctaatacaaagcctattttataataaaatattgaatagctcacgtaatatactgactactatactcaagtacagtttcttctgaatgcatgtcactttctcaccattgtaaagtcaaacaattataagtcaaactatcacaagccagggaccatccatatgtatttcattcagaaaatgctggaaaaagcatttaggagaatatctagatgagagaaggtagaaagccatgcacaaattcactgagagtttaaaaaaatgcatgcatattgtggagatagaaatcaaatctatttgtttccatctgctgtattcttcccaaaatattatctcttcttatcccattgtactatattgcatttctttgaccatttattgtgtatctcttaatatttcccacttcatcattactaacctcactcactctgaacttgatgagagcacctgagcattaatttttcttataattatttaatgattaccagaattcgttcagtatggccagctctggtcaaagtgaggcaggcaagatgctttgtcaactgcctggatggaatgtctcaaaaggtttccatttcatggtagcattatgcaaagttcaagacgtttaatcaagacccttcacttacttaactatacctccttgagaatcccatctatgaaaaaattctagtcattataaaaatgattgattaaatgagggaagtagtagagttcttcatttctttagttggtttagtctcctatgagtcaatcctagttttcaaaattcttaataaaccatttattccttcaactttctatgccatttgatgttttgtaaaaaaaaatataatatgtatacaaaaagatatttcaaaatctagaaagagagctttagagctttgtaaagctcttttaaaaatcaaaagcaactactgttaattaacatgttgtactatgcaatttctttaccattattactcttagtatttttaagaaaagtctttccattgttattataaatgcttctattgatatttattttaataactgttattacagtccgtcatgtacatacactatacttaaacctaatgtttggtatttaaatcgtttcaagattttatcactgtcaacaaagtatgatgaatatttttatgctgaaaacttctgtaaaaatagaattccaagagtattattgcaccaaaaggcatggacttaacattcttgatacatgatttcaaaatattttctttaaggtttgaatcagtctatattccctccagcagcgtataaaagtgccaatttctctgatccttagccagtttgggtaataaaaattgtaaaacttttttttctttttttttgagacagagtctccctctgtcgccaggctgaagtgcagtggcgcaatctcggctcactgcaacctccgcctcccggggtcaagctattctcctgcctcagcctcccaagtagctgggactacaggcacccgccaccaccatgcccagctaatttttgttatttttagtagagatggagtttccccatgttggacaggatggtctcgatctcttgacctcgtgatccaccctcctcggcctcccaaagtgctgggataacaggtgtgaacaaccatgcccggcctgtaaaactttttcctaatgtaacagaaacataatagtattacattttatcatatttctttgatttctaagacacacatacacacacacacacacacacatatctgtatatacaaatacacgtatagcttacattttaattcttccttcatttcatttgttcatttattaggtcttggagattttgtgaaactgtttaaattcttttttatactatgaagatatcaaccttttgtctctacagcatttcaaattcaagtatgattcacgtgttagtttggggtagatcattataggcacatgtaggaaacagctttcagagatgccttaaccgtaattatgcatttgtattctaatttttatttaatgttattattgattgcatttttaaagattctgtattttttaaaccatttatttgtatatattggtatacaatcttgccattttctgggatttcatatttccttatttttgttttttaccttttttggcttgaattttttgagtttttatgcattcttttccagtttcttaagatgctaataagttcatctatttgagcaattgagaacatttaaagcaatagactgcctctgagcacagctttgtccatattacattaaccttttataccctgggttcccactagtttttaaataatctactatcaaataaaagatttgttaataataaattttaaatcattaacacttaacgcattattttcagtcacactaagttgattccttcgtttctttcaggttgcttcacagtcttcccttctatctgattcagtggaccaagtaaatgactctctggtaacagaatttgtattacttggacttgcacaatccttggaaatgcagtttttcctttttctcttcttctctttattctatgtgggaattatcctgggaaacctcttcattgtgttcacagtgatctttgatcctcacttacactcccccatgtatattctgctggccaacctatcgctcattgacttgagcctttcatctaccacagttcctaggttgatctacgatctttttactgattgtaaagttatttccttccataattgtatgatacaaaagttctttatccatgttacgggaggagttgaaatggtgctgctgatagtcatggaatatgataggtacactgcgatctgcaagcctctccactatccaactattatgaatcccaaaatgtgcatgtttttggtagcagcagcttgggtcattggggtgattcatgctatgtctcagtttgtttttgtcataaattaaccttctgtggccctaataatgtggggagcttttattgtgattttcctcgggttattaaacttgcatgcatggacacttacgggctagaatttgtggtcactgccaacagtggattcatatcgatgggcaccttctttttcttaattgtatcatacatttttattctggtcactgtccaacgacattcctcaaatgatttatccaaagcattcttcacttcgtaggctcacatcaccgtagtggttttgttttttgctccatgcatgtttctctacgtgtggcctttccctactaagtcattggataaattttttgccatcatgaactttgttgtcacccctgtcttaaatcctgccatctatactttaaggaacaaagatatgaagtttgcaatgagaaggctgaatcaacatattttaaattctatggagacgacataacacatttggttgatgagagcacaggataaatgccatggaccatcaagactcctgtgatcaccatgatcactatggaacgcgcacatttttagtattgcctgaaaaaactgaaaaatctgcaaaaaggatgcattaaatctaagaattgtatttcagataaagttgcaacattttttgttaatcataaaaagtatatatttctatctaatgtgtgtatctaattaacagcaatgactatctttaattttgatgtagttattttatatctgtatataagcacatacacatatatatgacctaggtttatttatcagtatttttatgctgataataagcatcactggaaattaattttcttatggaaattatgtggatccaatggataaaatatgagtttatataaattagtaaatgccaaaatcaaggaagaaacaatttttattttaattgtactttaagttagataaatggtaaggtcaacagcttgttacaacccttaagtattattttcaggctgattgtcaatatgttttgtacaatgttctcacttataggtgggaattgaacaatgagaacacatggacacaggaaggggaacatcacacaccggggcctgttgtggggtggggggaagggggagggatagcattaggagatataactagtgttaaatgacgagttaatgggtgcagcacacccacatggcacatgtatacatatgtaactaacctgcacattgtgcacatgtaccctagaacttaaagtataataaaaaaaatagactctagtactctgtattatgcaaaatttgtctatgttacacttttttaacaacacaatcctattgcccttgaaatcttcttcaaagcatttctcgagtcactcttaaaaagcatctacaacctaaaagtataggaagagatttatttcctggagaagagaccccattgagatcttaaaagcacatataatgtgcctgtgcttaacttaaggtgcttaggacaaagaaggcgattgacatctttcaggtaaaacctggtaagtttggtggtcaaggaacacaactgagacatcacttggatgtatttctatgactattttaagaaacataaattgtggtgactcactcagctcacttttaactactgcatggtaattaaagatgcaaaataaaataagttacaagaagtgaggttttttattggttaaagcaatttttctatattttctccgcaagttggtcataaaagttctaagcattcctctttttataaaatcgaagcattattacttactctcttgttaacctatctggattttaattttgtaactttattatatttgttttgctgtgattctttaaaaagcacctttagactcagtgagatagcaaaaatatccaaataggccaaaaaattgtggcaatgtcctctcactcaggaaaattctgtgtgttttctctaatggccaagggaaaacttgtgagactataaaagttagtctcagtacacaaagctcagactggctattcccagatctcttcaggtacatctagtccattcataaagggcttttaattaaccaagtggtttactaaaaaggacaattcactacatattattctcttacagtttttatgcctcattctgtgaaaattgctgtagtctcttccagttatgaagaaggtaggtggaaacaaagacaaaacacatatattagaagaatgaatgaaattgtagcattttattgacaatgagatggttctattagtaggaatctattctgcataattccattttgtgtttaccttctggaaaaatgaaaggattctgtatggttaacttaaatacttagagaaattaatatgaataatgttagcaagaataacccttgttataagtattatgctggcaacaattgtcgagtcctcctcctcactcttctgggctaatttgttcttttctccccatttaatagtccttttccccatctttccccaggtccggtgttttcttacccacctccttccctcctttttataataccagtgaaacttggtttggagcatttctttcacataaaggtacaaatcatactgctagagttgtgaggatttttagagcttttgaaagaataaactcattttaaaaacaggaaagctaaggcccagagatttttaaatgatattcccatgatcacactgtgaatttgtgccagaacccaaatgcctactcccatctcagtgagacttactataaggacataaggcatttatatatatatatattatatatactatatatttatatatattacatattatatatatataatatatattatataatatataatataaatataatataaattatataaatataatatatattttattatataatataatatatattatataatataatataatataaattatataaatataatatatatattattatataatataatatatattttattatataatatatattatatattatagaatataatatatattttattatataatatatattatatattatagaatataatatatattttattataaaatatatattatagaatataatatatattttattatataatatatattatagaatataatatatattatatttatatataacatatattattatataaaatatgtataatatatattatataaatatatttatatattatataaatatatatattatatataattctaatggttgaattccaagaataatctatggcatgaaagattttacctgtcaacagtggctggctcttcatggttgctacaatgagtgtgtaagattctgaagaactcctttaataagcctaaacttaatgttcaacttagaataaatacaattcttctaaatttttttgaataatttttaaaaagtcagaaatgagctttgaaagaattatggtggtgaaggatcccctcagcagcacaaattcaggagagagatgtcttaactacgttagcaagaaattccttttgctaaagaatagcattcctgaattcttactaacagccatgatagaaagtcttttgctacagatgagaaccctcgggtcaacctcatccttggcatatttcatgtgaagatataacttcaagattgtccttgcctatcaatgaaatgaattaattttatgtcaatgcatatttaaggtctattctaaattgcacactttgattcaaaagaaacagtccaaccaaccagtcaggacagaaattatctcacaataaaaatcctatcatttgtactgtcaatgattagtatgattatatttattacagtgctaagcagaagagaactgaagtgaatgttcatgatttattccactattagacttctctttattcttaaaaatatttaagatcactaaatttttataggactttaaaaacagtaatgtgctgctttgagtgtgtaggactaagaaatgggattcagagtagtaaagagaaaagtggaatttccaagcactatgaattactgttctttaaaaaacagcaaaaatcaaataacagtattcctccaaaaaagatggcaagtgtaaactctataccttcatgtctcccgtggaatgttagtgatcaatttccacttctctcttttacatcttacttgcccattaactcttatacctaatccaaagattgttaatatggctatgcctcactttcaggacaccttttatttgttacttctcttcactgcaaaacttcttgaaacagtacttattttctctcctccatacacaattgaaatggctctcaactcatgcccagaagtcagtgttcagtctctcacctggcagatagcaacttacaaagatgccccaacaatacctccttgtgtctagacagtcatcattatcctttacctttttctgtatttatttctgctcctaaaagggatctctatgtaaagtattgttatactagtgcttgttataattattatcagagttaaagccatcacaatgttcccaattacttaaagacattggaataacattttttttattttccacatcttgccaaaaaatattttgttatcagtaccttaataatggctattatatattgaccattactatttgctagaaaatttatatacctggtcgtatccaatcctcacagaacttctataaagttgtgctattatcacctatattttccagatgtggccgtaagactgaaatcacttaggtgacttgtctaaggtcattcagatacatagtagataacccaggatttgaacacaggcctcctagcacacaagctcatatcttaactactttaatacgttgctcgatgggatcttacaggtcttcattcacccctttcctgctcacacaaccacaacctgcagttattacctactgttaggcttaaaataattacttggcttcatttccaagctccctcccttccaattcacattgagtccagagctaaattaaacaatcattcaaaatttttcagtagttcttgtctctataataaaacagaaatgctttagaaagcattccaaaatctcttaccagttttatctcctatgaaagtccttcacactttctctcatttaaactttattgcattttcctcactttttctcacttcacttttgaattccctattcttttatcctctgttaatttttaagtattatatttgtgatattattttttctttttttctattttttatctttcatttcattttggcctatttttttctcttaagaactttaatatcaccaaataacatgtgtgctacaaactgttttgtagttcaaagaaaaaggagataaacatagagttatggcatagacttaatctggcagagagacaagcataaataatggtattttatattaggaataaacctaacattaatggagacactgagaagccgagataactgaattataaggcatagccagggaagtagtgcgagataaaattatgatcttgttgaattctgaatgtctttaagtaatagattatagaaagtcactgtaagagtgagcagaatgatataaaatgaggctttgaatttgaatataataattctgacttccttctccttctcttcttcaaggtaactgcagaggctatttcctggaatgaatcaacgagtgaaacgaataactctatggtgactgaattcatttttctgggtctctctgattctcagggactccagaccttcctatttatgttgttttttgtattctatggaggaatcgtgtttggaaaccttcttattgtcataacagtggtatctgactcccaccttcactctcccatgtacttcctgctagccaacctctcactcattgatctgtctctgtcttcagtcacagcccccaagatgattactgactttttcagccagcgcaaagtcatctctttcaagggctgccttgttcagatatttctccttcacttctttggtgggagtgagatggtgatcctcatagccatgggctttgacagatatatagcaatatgcaaacccctacactacactacaattatgtgtggcaacgcatgtgtcggcattatggctgtcgcatggggaattggctttctccattcggtgagccagttggcctttgccgtgcacttacccttctgtggtcccaatgaggtcgatagtttttattgtgaccttcctagggtaatcaaacttgcctgtacagatacctacaggctagatattatggtcattgctaacagtggtgtgctcactgtgtgttcttttgttcttctaatcatctcatacactatcatcctaatgaccatccagcatcgccctttagataagtcgtccaaagctctgtccactttgactgctcacattacagtagttcttttgttctttggaccatgtgtctttatttatgcctggccattccccatcaagtcattagataaattccttgctgtattttattctgtgatcacccctctcttgaacccaattatatacacactgaggaacaaagacatgaagacggcaataagacagctgagaaaatgggatgcacattctagtgtaaagttttagatcttatataactgtgagattaatctcagataatgacacaaaatatagtgaagttggtaagttatttagtaaagctcatgaaaattgtgccctccattcccatataatttattaattgtctaggaacttccacatacattgcctcaatttatctttcaacaacttgtgtgttatattttggaatacagatacaaagttattatgctttcaaaatattcttttgctaattcttagaacaaagaaaggcataaatatattagtatttgtgtacatctgttccttcctgtgtgaccctaagtttagtagaagaaaggagagaaaatatagcctagcttataaatttaaaaaaaaatttatttggtccattttgtgaaaaacataaaaaaagaactgtcacatcttaatttaaaaaatatatgcttagtggtaaggagatatatgtcaacttttaagaggttgaaaaacaaacgcctcccattataagtttatacttcacctcccaccactataacaacccagaatccatgagggcattatcaggagtgagtggaagagtaagtttgccaatgtgaaatgtgccttctaggtcctagacatctgtggtataactgctcataagcagtagaaagaatttagagggatccaggctctcatcacgttggcacaaagtatattacttggatccatctatgtcattttccatggttaatgtttaaaaccacaggctttaaagtaaaaaacaaagagctggattcaactctactgactcttattaatcatgattttgggcacattacgtagctttcatgagctttagtttctacatttataaacaggagattatacctattatgcacggttattatgaaggaaaatgacaaaatagatataaatcaaatagcccacttcgagacatattaagcatgaataaacattagatactattaaaatcctatatattaacaaagccaaaagtttcaaactttactttttcccaacattcttgtgaaatatgacacatcccaatcttaacagatgctcatttgggatactgtacttgtgagtggaagtgtgtatatttgtgtgcaagtgtgtactcatatacttccaccttaccaccctagaaaggcatgatgaaaatttaagatagaaggaaaatataaattgaaaaaaaaaaaccttaacaaatgattctgacaaatatcttctctttccagggagaatcactgagccagaataaaattgaacactaaatattctaagaaaaaaggaatctagtttgtcaaaatgtgacttgaattaatagataaggagagtcagatgataagagggtcaaaattatgtttatcttaggaaaagtagaatagaaaatttataagcagattaaaaacacataataaaagtagtaaataataatgacagtatctcaaatcagtgcaggggggaaaggcctactaatgtgatggtgggataattggatagcaatatgggaaaagatatatttaatttatttgctacaccaaatgccaggacaatctctaagtgaattcaagacataactcttttttcaaaaaaactatgcaaatattaaaagaaaacaagttaatgtttttataatctatgaatatggtaaagatggataacattgactatcaaattaatttttaatgcgtaataaaactatgagaaaatttaaaagtgagaagaaactacttgtaactcacataatagactagtacttctaacacatagggaacttctaaaacaaaacccaaaatattaataggaaaatgggcaaaacagttaaacttacagttcatacataaggagaatcagtcttttttttttttttacagttgtaggcagaaaacttttatttttcatttatttgtaaaatttacccctaatttattcataattcatttaactgctaagggcattaatgtgtacaacgccatgggagaaaccagtatattcagaatttctcctgaaatttgaccagaagttatggacatccctcccctgggaaggaggcaggcagaaaagtttggaatctatgtagtaaaatatgttactcttttatatatatacatatatgtgtgtatatgtgtatatatatatacacacatatatacatacatacatacatacatacatacatattatctgaattaggcctggtcttttttaatactttaagttctgggatacatgtgcagaatgtacaggtttgttacacaggtatacacgtgccatggttgtttgctgcacccatcaactcaccatctacattaggtatttctcctaacgttatccctctccttgcctcccacctcccgacaggccctggtgtgtgatattcccttccctgtgcccatatgttctcattggtcaactcccatttatgagtgagaacatgcggtgtttggttttctgttcttgtgttagtttgcggagaatgatggtttccagcttcatccatgtccctgcaaaggacatgaactcattcttttttatggctgcaagaaatgcaaatcaaaaccacaatgagatgccatctcacaccagttagaatggcaatcattaaaaagtcaggaaacaatagatgctggagaggatgtggagaaataggaatgcttttacactgttggtgggagcgtacattagttcaaccattgtggaagacagtgtggtgtttcctcatggatctaaaactagaaataccatttgacccagcaatcccattactgggtatatacccaaacgattgtaagtcattctactataaagacacatgcacaggtatgtttattgcagcactattcacaatagggaagacttggaaccaacccaaatgcccgtcaatgttagactagataaaatgtggcacatagacctggtcttaaaatcaagaacagagattgttacttttacatccattcctaattgataaaccattcagttataccacatcttagcttctggactacaatgaccatatttggggttttctttctaatttcattataggttcagagggtacatgtgcaggtttgagacaaaggtatattgcatgatactaaggtttggagtacaaatgatcccacctcccaggtagcaagaataatacccaatatgtagtttttcaactctttcccctcttcctccatcctccctctgctactctgtggtgtctgtttttctcatctttatgtccatgtgtactcgatgtttagctcccccttgtaggtgagaacatgtggtatttggttttctgtttcagtgttaattcacttaggataatggcctccaactgcattcatgctgctgcaaaggatgtgactttcttcttattagctgcatatattttgtggtggatttgtaccacatttactttatctagtccaaagttgttgggcacccaggtggattccatgtctttgctattgtgaatagcactgggacaacccatacaagttcatgtgtctttttggtaaaacaatgtattttcctttgggcatatatgcggtgatggaattgctggatcgagtggtagtttaactcttagttctttgagaaatccccagactgttctccacagtggctggactaagttgcattcccaccagcagtgtagaagtgttccccattctctgtagcctcaccagcacatgttaaactatctttaaatatatgaaaaaaatgttcaagtctctcagattaagatgcatgcaaagtaaaatgatacttaaatatcagttctaacctataaaatatcaaatatctgacctcaatatttgataatccaacctgttgatgaagctgtagagagaggcactctttttttttttttttaattatactttaagttttagggtacatgtgcaccttgtgcaggttagttacatatgtatacatgtgccatgctggtgcgctgaacccactaactcgtcatctagcattaggtatatctcccaatgctatccctcccccctccccccaccccacaacagtccccagagtgtgatattccccttcctgtgtccatgtgatcttattgttcacttcccacctatgagtgagaatatgcggtgtttggttttttgttcttgcgatagtttactgagaatgatgatttccagtttcatccatgtccctataaaggacatgaactcatcattttttatggctgcatagtattccatggtgtatatgtgccacattttcttaatccagtctatcattgttggacatctgggttggttccaagtctttgctattgtgaataatgccgcaataaacatacgtgtgcatgtgtctttatagcagcatgatttatagtcctttgggtatatacccagtaatgggatggctgggtcaaatggtatttccagttcgagatccctgaggaatcgccacactgacttccacaatggttgaactagtttacagtcccaccaacagtgtaaaagtgttcctatttctccacatcctctccagcacctgttgtttcctgactttttaatgattgccattctaactggtgtgagatgatatctcattgtggttttgatttgcatttctctgatggccagtgatgatgagcattttttcatgtgttttttggctgcatagatgtcttcttttgagaagtgtctgttcatgtccttcacccactttttgatggggttgattgtttttttcttgtaaatttgtttgagttcattgtagattctggatattagccctttgtcagatggtaggttgcgaaaattttctcccattttgtaggttgcctgttcactctgatggtagtttcttttgctgtgcagaagctctttagtttaattagatcccatttgtcaattttgtcttttgttgccattgcttttgtcccactgatcccacagaaatacaaactaccatcagagaatactacaaacacctctacgcaaataaactagaaaatctagaagaaatggataaattcctggacacatacactctcccaagactaaaccaggaagaagttgaatctctgaatagaccaataacagaagctgaaattgtggcaataatcaatagcttaccaaccaaaaagagtccaggaccagatggattcacagccgaattctaccagaggtacaaggaggaactggtaccattccttctgaaactattccaatcaatagaaaaagagggagtcctccctaactcattttatgaggccagcatcattctgataccaaagccaggcagagacacaacaaaaaaagagaattttagaccaatatccttgatgaacattgatgcaaaaatcctcaataaaatactggcaaaacgaatccagcagcacatcaaaaagcttatccaccaagatcaagtgggcttcatccctgggatgcaaggctggttcaatatacgcaaatcaataaatgtaatccagcatataaacagagccaaagacaaaaaccacatgattatctcaatagatgcagaaaaggcctttgacaaaattcaacaacccttcatgctaaaaactctcaataaattaggtattgatgggacgtatttcaaaataataagagctatctatgacaaacccacagccaatatcatactgaatgggcaaaaactggaagcattccctttgaaaactggcacaagacagggatgccctctctcaccactcctattcaacatagtgttggaagttctggccagggcaattaggcaggagaaggaaataaagggtattcaattaggaaaagaggaagtcaaattgtccctgtttgcagacgacatgattgtatatctagaaaaccccattgtctcagcccaaaatcttcctaagctgataagcaacttcagcaaagtctcaggatacaaaatcaatgtacaaaaatcacaagcattcttatacaccaacaacagacaaacagagagccaaaccatgagtgaactcccattcacaattgcttcaaagagaataaaatacctaggaatccaacttacaagggacgtgaaggacctcttcaaggagaactacaaatcactgctcaaggaaataaaagaggatacaaagaaatggaagaacatgccatgctcatgggtaggaagaatcaatatcgtgaaaatggccatactgcccaaggtaatttacagattcaatgccatccccatcaagctaccaatgactttcttcacagaattggaaaaaactactttaaagttcatatggaaccaaaaaagagcccgcattgccaagtcaatcctaagccaaaagaacaaagctggaggcatcacgctacctgacttcaaactatacgacaaggctacagtaaccaaaacagcatggtactggtaccaaaacagagatatagatcaatggaacagaacagagccctcagaaataatgccgcatatctacaactatctgatctttgacaaacctgagaaaaacaagcaatggggaaaggattccctatttaataaatggtgctgggaaaactggctagccatatgtagaaagctgaaactggatcccttccttataccttatacaaaaatcaattcaagatggattaaagacttaaacgttagacctcaaaccataaaaaccctagaagaaaacctaggctttaccattcaggacataggcatgggcaaggacttcatgtctaaaacaccgagagaggcactcttatgcattgttggtgagaatacaaaatggtacaactcttggcaatatcttaaaaaatttacatggtactgacttttggtctagcaatcctacttctatcctaaagatatattggcaaaaatacaaaataattgatgcacacaagtctattcattgaagcattgtttttcatagtaaacggaaagtaggccgggcgtggtggctcatgcctgtgatcccagcattttgggaggctgaggcgggcagatcacttgaggccaggaattcaagaccagcgtggctaacatggcgaaaccccatctctaccaaaaatacaaaaattagctgggcgtggtggtgcacacttgtaattccagctacttgagaggctgaggtgggaggatcgcttgaacctgggaggcagaggtttcagtgagcccagaacgtgcctctgcactccagccaggatgacagagcaagactccatctcaaaaaaaaaaaaaaaaaaaaaaggaaaataaccaaatgacaattagtgagtactacttgcaaaacttgtacgcaatagagtatgaagcaactataaaatgagagagaaatatctccaaatactactctaaagtaatctacaaggtataccttaactgaaaagaaacaaaaaagtgacaccagaatgctatttttatgttaaaacagggataaatacattggatttacatgcatatataagtatatattttataaatgtttaaataagcatacttaaaatggcaaaaacataatacatatataattttcttatggcaggaggaggaaacagggcaaggcacagggataaaagttattctgaatacatcttattttatatttttgactttgaaatcatgtagctgttttatgtaatataaaaatgtaattaaattaacagaaaaaaattacaactgctaaaaatcaagatctggctttttaattaagttataaaacatcggagaaaagaattgtttcatgggacactaacatacagacaaattcatttggaacccaatgaattaatgggcctaagataacaaccaatagaagctaaaatgacgaataactgtttcagaagaaaacatatatggaatgaatcagctgaaaatacctgaacctactgatcaatttttatatgtcacatgaagtgaatacacataaagtataatatggagcacatagaaccaactagaaatgagcctaattggtaaatattctctattttatgacaatatacaggaaatatgtcgaagagagaaacatgcaagaacaccgtagggtttaataagataatcacaaggtatggaatattcaacaggatgaatatcctggattattcagcaaatacacagagctaaaaagcaggagaaaggaattcatatatatttttaaaaactaaaaagatatattagctgatgcaactttgaaacttctttagatcctgattcaaatagagcaaatttaacaaatatatttgaaactattaaaataatttaaaaatgactaagtatttgattatatcaaatatagacaataataaccttgaatgtacatggattaaatgtccacttaggggctgggtgtggtggctcatgactataattccagcactttgggaggccaaggcagaaggattgcttgaggtcagaggttcaagtgcagcctggtcaacacagtgaaaccctatctctacaaaaaacaaacaaaaataaaaaattaactaattttaaaaaatatatatttcttctaaattctccacctgaaagatatagactgactgaatgaattttaactatgatctgactatgtgcttccctgaacaaatgcactttacctgtaaaacacatattaactaaaagaaaagagatggaaaaaggtattccatgaacagaaaccaaaatgagtaggagtagctatacttctgtcagacaaaacagactttaagtcaaaactagctttagaaaaaagacaaaaatgcttattatacaacgataaaggaatcaatccagaaagaggatataacaattttaaatatatatgcagccaacactggagcagccagattcataaagcaaatactactagatcaaaacagagaggtagactcaaatataataatagtgaaggacttcaacaccccactttcagcattaaacagatcatctaataagaaaaccaatctcgcagccctcaccctggagagtccacagggaccaggggttggtctgaacccccagcacagagcacctgcctcacagaagagtggctgcatttttcttcctgcagttttcagtcctcacttctccttaccaagcagggccgcctggcctgggactcctgtacaactaccctgccccccacctgaccacttcaataagaagtagcccagcatttctccaaggaggaaataccagagtcaattcacaaccactgcaattgtagtggtaccaccataacagcccttgggctgcagaaggaactaagagtctaatcactacagtggcaccttcagcacaccacagccaccatacagagaggaatccagccccctcccctgggaacccccaccacccactccaccaggcacagcacccagctcataactgcagatcagttgccccacccacagctgagcttacctactggcagtggcccagactttccctagggagaggctcccagaggcaaacggcagcctctctgcccctgtcacagcagcagttctatccatgctgtcctcaggcttggaaagaaacaaagcgcctgaaggctgcacctgaacttacagcatgccacagttcccatacggagaggagaccagtctcttctcccagtgagccctaaaccccctgatccccaacaagcagagccctaacctcacaccagcagtacagctgctccatcccccaggctgaacattcccagtaatagcagctccacctggagatggagcccccagggtcaaccaaaagcccctctgccactgcctctacagtggtactacccctgctacccttgaactaacaaaggagcaaagaccccagtgctttatccacacctccaacaagctgcagtcgaccacaaagaagaaacaagtctgtctcccatgggtcctacccacaccccctgctgttcaccatgaatgatagagtcaacagtgtgaaaacgaccatactgccaaaagcaacctacaaattcaatgcaattcccatcaaaataccaccatcattcttcacagaactagaaaaaacaaggctaaaattcacatggaaccaaaaaagagcccacatagccaaagcaagactaagcaaaaagaataaatctagaggcatcacattactcgacttcaaactatactataaggccatagtcaccaaaacagcatggtactggtataaaaataggcatatagaccaatggaatagaatagagaacccagaaataaagccaaatactttcagccaactgatctttgacaaagcaagcaaaaacataaagtggggaaaggacaccctattcaacaaatggtgctggtataattggcaagccacatgtagaagaatgcaactggatcctcatctctcaccttataaacaaatcaactcaagatggttcacagacttaaatctaagacctgaaaccataaaaattctagaagataagattggaaaaacccttctagacattggcttaggcaaagacttcacaatcaagaacccaaaagcaaacacaacaaagataaatagatgggacttaattaaactgaaagccttctgcacatcaaaataaataatcagcagagtaaacagacaacccacagagtgggagaaaatcttcacaaactatgcatccaacagaggactaatatccagaatctacaaagaattggaacaaatcagcaagaaaaaaaaccaaacacaaggatgacagtggaaatacaaaaacaagacataaatattctgaatagtgataataaaacagtgcataccagaatacaaactgtttccaagttacaatggttcaaccatttttcagctttatggtggtgtgaaagtgatatccattcattagaaaccatgctccaggatgggcgcagtgggtcacgcctgtaatcctagcactttgggaggccgaggagggcggatcacaaggtcaagagatcaagaccatcctggccaacatggtgaaaccccgtctctcctaaaaatacaaaaattagctgggcattgtggtgcgtgcctgtaatcccagctattcgggaggctgaggcaggagaatcacttgaaccagggagtcggaggtgttgcagtgagccgagatcgtgccactgcctccagcctggcaacagagtgagactccatctcaaaaaaaagaaagaaacccgactccgaattttgaattttgatattttcctggactaccaatatgtggcacaatgctctctcacaatgttgtgcaacagcggtgagctgcagcttccagtcagccaaatgataataaaggtagataatccatcttgatatcttcctgaagaacataatgcctgcctaccatcaacaggcatcaatactttctaccagctattctcaaccctcatgatcggaagagacagagactgactgtgtcaaagtattagtcccatcattcagcaattaaccttagctcaatgcttcaaaaattcttcaggccctgtgtaatttcagctacgtacattaatgataagtacccatacaaccattctgtttcttattttcagtaccatatttaataaatatcagttattcaatactttatttagacattttgttagattattttgaccaactgaagtctaatctaaatgttctgagcatgttcaaagtaagctaggccaacctataattttcggtgtgctaaatgcatttttaacttatgatattttcagtttacgggggtttgttgagacataacttcatcatacatcaaggagcatctgtatatgggatacagttaaagcagtgatcagaggaaaatctatagccttaacacatttattaataaaagtgtaggaattaaattatcagctgaaaaatgtaaaaagtatctaaaagagtaagcagaaagtacaagaaagaacccaaagtagaaaaaagtgaaaattaataaaataagaagccaaaaaacagatcaaatcagtaaaccaaaaatcttgttctttaaacaaatcaacaaagttgacaaaaaaattagatcttttaatcatgaataaaaaaaaagagaaagcacaaaaatgaataaggaatggtgagagaaataactattgataatcagcaaataaaaaatcattaaaaacaatgttgttcacatctatgaaaaacattgaaagctagagggaatgggtaattttctagaaaaatacaattcaccacaactgacttcaaaaaaaaaaaaaagaagtacagcacttatgtgagcaatttccatagagaaatacagttgtcatggaattataacacacacacaaacactaggtttagatgttttcacggagaattccaccaaacctttagaaatcagatcgtccaaaggcaaattaacaaccctcagccatttgcggcaaaatattacaattgaggcaagatatactgtactgaaaacttgaggaaaaagcaggagagaaagttcctttgggaaattcgaatactcaaaagtgcttacatacaatgaaaaatttggaaatccataagcatggccaaggtgggacacatgctcagaaaaggcctgagaagacactaataactcacctttagtaattcctaggctcacagcaagaaaaaatgaaggctaaggcagaattatacatggctccgctaagtgttgagggagccccaatacagagtcagtaagcaaagtctgggagatgtttttcatatttttttcttttttggctacttgcagtcaaggaaatcatttttaaatcactaaatgctaaatgaacacaagctaaaggaaccgagccgccttcaaacatcaaacataaaaaagaatgcagatattacaaaaccagtttacaaaagttactaaacaaataaaaactacatcccacagtgggtaacaaaaataaccttgaagaagggaaaaatttggtttccagaataaacacattataatatccaaaatgtccagttttcaacaaaaattaagaagcatgcaaataaacacaaaactatggcccatttacagaagaaataaatgagactctccctgagtaagcagatattggaaatattagacaaaaactttatataactgtcttaaataaacttaaagagctaaagaaacccaagagaatgacatataaataaataagaaatatgaattttttaaaaggtacaaaaaaattctgaggctgaaaagtacaataactaattaaaaagttactttttacttagggttccaatagaagatttgagcagctggaaaaaagaatcagtgaacttgatagatcaagtgaaatgattcagtctgaagagcaggaaaatgaaagaatgacaacaaaaaagaatagagcctaaagacctgtgtaacaacatcaagaatgcctacatacagaatcctggtggggagtgaggggcaggaagactatttgaagaaatgtgtttgaaagcttcccaaatttcactaaaaacaaatatatacattcaaaaagctcagtgaacttcatcaaggaaatatacaaagatattcacaccaagacacactatgtttcaaattgtcaaaaggcaaagcgaatgtttgaaagcagcaagagaaaggcaacgcgtcatttacaaaggatcctcaataagtttgacagcagatagtgcattataatccatggatgccagaagagcttaggaaaaaggcaatgcatcatttacaaaggatcctcagtaagtttgacagcagagagctcatgataaaccatgggtgccagaagagcttagaatgacattttaaagttctgaaagaaaaaaacactgtcaaccaaaaattctgtaacttggaagatgccccttcaagtattaaggataaattacacattcccagattaaaaaaaaaaagagagagagaaagagaaagaaagaaagaagagagagaaagaaagggagagaaagaaaaagaaagaaagaaagaagagagagaaagaaagggagagaaagaaaaagaaagaaagaaagaaagaaagaaaaagaaagaaagaaagaaagaaagaaagaaagaaagaaagaaagaaagaaagaaagagaaagaaagaaaagaaagaaagaaaagcaagcaagctttaaaagttcatgtttggtaggctgtacttcaagatacactttaaaaaaaaaaagactccttcagatacaaactaaaaaacactagaaagtaactcaaaaccacataaagaaataactccagtaaggataactacataggtaaatataaaaggaattatcatattttttgtaagtctttttaaatattctatatgttttaaaacaaatgtgtaaaataatgactataaatctatgttaatgaagcatgatgtataaagatgtggtttgtgaaattaccaacataaagaaattcataggaaactaaataataatagagattttgtatactattgaagttgtttcaatttactctaaattgttccaaattaagaatgttaattgtaaatccccatggtaaccactaagttaatatcttttgaaaatacagaaaaggaaagcagagggtaaacacagtgatatgctacaaaatagcaactaaacacaaaagaaggcgataattgaggaaattaggaacaaaggaggtataagacatacagaaaacaaaagcaaaatggtaggagtaagcccctctttatcagtaattacattaaatacaaatgaattaaactctccaatccaaagaaagagattgacagaatggatttttaaaaaatgatccaactatattgtccacaagatactcactttagatcaaaatacacaatgcgttgaaatgaaaggatgggagaaaatattccatgtaagtaataaccaaaggagatctgaggcaaatatacttatatcagacaaaatagactttaagtcaaaaactgttacaaaatacaaagaacagtatatattgatttcaaaattaaacaagaagatataacaattataaatatatgtacaccaactaacagggctccaaaatatataatgtaaccattgagagaattaaagggagagacagacaattccacgaaaattgttgggcattttaaaacccaactttaataaaggacaaaacatccagagcaaatatcaagggaggaattagaggatttgaataaaactataagcaataactatagataacacttctctcaaaaactgcagaatacacattcttctcaagtgaacatggaacattctccagcacagatgatatgttaggccataagataagctcaataaacttaaaaagattgaaatcatgcaaagtatcttcactgaccacaatggaatgaaataagatatcaataacaaaagaaaaactagaaaatttacaaatatttggaaattaaacaacacagtatttaccaaccaatgaatcaaagaacaaatcatgagggaaattagaaaatgtttagagacgattgaaaacaaagatataacaagatgggtgtgatatatcaaaagcagtgctcagagttgtaacacctacattttaaaaaagaaacatgtcaaatcaataaccaaactttactcaataaaccataaaaggaagagcaaacaaaatccagagctagcagaaggaaggaaataaagattagagcagagataaatgaaattgagaattaaaaaattatacagagatcaacaaaactaaaagttggttcttttaaaatatcaataaaattaatatacttttacatagactaagcaaaacatctctattcagctgacttttttttacaagggagccaacattattcagtggggaataatagctttttcaacaaaaagtgctgggaatactgaatattcatatgaaaaaaaaatgaagctggacccctacctcacattatatacaaaatctagattggatcaataatgtaaatatacgagtgaaaaccatacatgcttagaagaaaacatggaaataaaacattgctgtggattggcaatgcattcttagataatacaccaaaaatacaagcatgaaacaaacaaatgtagccaaaatgtaccagaatctgaaaacatgtattatctataaagaattagaggggaatttggtgaaagaaatatgggagaatgggatattgctctgtgaatgcttttgtgcataattgtacatttttaattaagttaatcttttacactctcaaagtgtgatattaagcaagcaaagataagttattacaagactctaaaaccgaatgcaatgagaaacaagtgaatccaaatatatttcaaatgaatgaatgacataatcaaacttaaggggaaaataataattaatctgattaatttttgactgttctcttatttcaaattgacttttgaacatactttgactacatactattgcttgaaaaaataaaatatctgcaaaaaattattaaatcttcatgataggattttttctttttatattagtataaatataacaattctgaaacaaatgtatgtgcattgtaagattaagccaatgagtaaatattaatatatttgtattgctagaaccccagattctcactgtgaaaggacagagatacagatatggaataagacaaggaaagaagcagcccactgagttacattagaatcagtattatcaacataaatatgcaatgtgctctctcacatgctctttccttctcttaaaaaaatataatatgtacatattatatattatatgcatagacacacgtgtgtctatacatatcctatctatacatattgaggattaacaggtgctagtagaaaatattaactttctttgtattaacaggtgttagtagaaagtagtagtaggtgctaagataaaagccataattaaacctcctggtgaatgaacacaccatcacctacaatcttaccaaaaatagaaccaagcacgtgtcctagtcaaacctctggattcaactgtcatttggataaaacgcaaaggatagtgaaaatgtcgatcttcactgagagtctcaccagcaaatttcacagtgtggacatcaagtgacaaaaatcccacatttttcaacaaatatattgtatgggaaagaaaactttgaaaagaaacctgtatgttagaagggattttaaaaacacgacaaatgaaaacaaatgcgcaagactaaatcatagtgtcttggaatgcatgcatgaaggacacagccgtgaaaatgcaaggacgcctctactggaacagtcacgtttatcgtcacttttcaggagaaaggtggctgcaactgaggagagtcacatgcaggacttcagggctggcaaagtcctatatcttgacttatgtgatgattacagggatgtttacaaaaatcaaactataagtttgttttgtgccatgttttgtattgtgtgtgtgtgttttgtttttcaacttaaaaatacataaaatcaaaaccaaggcttcattatcaagtagcacaaagtctccaatctataacctcctttgtctggatatctgcatttaactaccattgccagagctaatcctgacaatgcattcatatttttaacactgaaacacagtaaacagggaaaattttgctcctctaaaacagggcatcttcaggcaatcagaacaactcagaaagtttctgtctgttgcataaaactcccctgtgcaaagagttacacaaaatgctgtcatagtaaaggtagttaactaacggcactaattgttcttgggcagtggccaagtggaacttcagagacctggcattgccagccagaaatcacttgtcatgggaattgtctcctggaatcactttggttgtcccagggtaacgcagggaaagtggttaatgggtcacttgggggtggcatcttcatcagtaaatcacatttactttctcctactaagaattttatttttggccatgaagccaaaagtcagctcttaaataacaagggaagcaaataatcattgaataaaaatagcagaaagaaaaagctgtgcaaagaaatttatgtttttaatttgttatatatgtatatttttatcatactttaagttctagggtacatgtgcacaatgtgcaggaataaaatttatgtttttaaaatttattctacattatgaattctacattagaaaaataaaccatagcctcatcacaggcacttaaatacactgaagctgccaaaacaatctatcgttttgcctacgtacttatcaacttcctcatagcaaactgggagaaaaaagcaatggaatgaataaaatgatagccacaaaaatcaaggtgggagaaatacttattatatgtccataaaaaattttaattaatgcaaagtattaacaccaatgattgcagtaatacagatcttacaaatgatagttttagtctgaacaggactatccaaaagttaattttctatagtaacagtttttaaataaaatatcaattcctgaaacacataaaatggtccatgagtatacaacgagtgaaaaaaaacaaattcagagcaaagataaattaagaagtatctaatattcaaacatagtcaaagagagggagatttctggataatcacttaagcccatggttaaacataaatgcaaatatgttaatgtttactgaataacttatctgtgccaagtggtgtattaatgattcatttttatttttcactaaatcttttctctaaagttggtgtagcctgcaactaaatgcaagaaatctgacctaggacctgcacttcttaccattttgctcatatttattccctgtgcatttttgtaacatgtatatgttatatatatagaaagagagagaggcagagatggaaagtaatttatggagtttgatgttatgtcagggtaattacatgattatataattaacaggtttctttttaaatcagctatatcaatagaaaaataaatgtaggaatcaagagactcattctgtccatctgtgatagttccatcatgatactgcattgtcaagtcattgctccaaaaatatggtttagctcaacactgagtgactataggaaaccagaaaccaggctgggcgctaaagatgcaaagatgaatgagacatcatctctgccgtccaaaagcttactgtctagtgggagagttacacacgtaaggacagtaatctaataagagctaataagtgaaaactaagataaattaataatacaagattacagggaaggtttccaaagtcaatgaggcctcaaatgaatcttgaaagtgtgcaaggattaaccaaatgaagaaatgtgtaagtttttcaaacaaaaaggaacagcatgagcaaatgcaaggaggcctaaaataaagagatgtgtaaagaggtgtaagcagctttgtgctactgcctgataattagaagaatatcgggagtaacaagagctatagaagagagtcacaattatggaaaaatatttattaaattataagaaatttatagcataaggaatagtaggaccattaaatgttttaataaagatgatgcttctttttttaatatttatttttattatactttaagttctagggtacatgtgcacaacgtgcaggttacatatgtatacatgtgccgtgttggtgtgctgcacccattaactcatcatttacattaggtatgtctcctaatgctatccctcccccctccccccaccccacaacaggccgcggtgtgtgatattccccttcctgtgtccaagtgttctcattgttcaagtcccacctatgagtgaaaacatgcggtgtttggttttttgttcttgagatagatgatgctttaaattgaccactctagctgcattgtgggaggaaaaaaagattttaaaacaagactagaaacagaataattagaaaaatgcaactacaatgcagatgagtgattatcaaggtctgaactgaatagtggaaatagagataaggaggcaaattcaagatatgtgcgtgacagtaaaattaacatgacctagtgtttgattgactctgtaaagtgaaaggaaaggatgaataatcaacaaataatatttattctaccaaatgcctccatgccgctttgatgacaggataatatgtaagcttttctatatttcagaaactatatgacatgacgaaaagtaaaaaggggatgggggtaaggaggtatcctgaattgactgagaaataaggaggtattccacagagaatataaataaacatatacttagtgttcaaggaataataaaaaagagaacatctatgtgtccaccatacaggatatgaaatagaacatttgccggccatggtggctcacacctgtaatcccagtactttgggaggccgaggtgggaggatcacttaagcccaggacacaggttgcagtgagccaagatcacactatcgtactccagcctgggccaccatgtctcagaaaaataaaaaaaactagatgtcttggaggattggaaacaaaatagaactttactagtgccttagacgcccattgggtgctccttgccaattgtgttctcctttatttcctgctggatatgaccactgtccttccattgcattgtatgtgttttttaatagactttaatggttctcaagtgatgcattatttagtttggttctttgaaacttatataaatgaaattattttgtagaagttctttcacctttatcagaaggtactttcaccttgattcaataataagtttgcatattacaaccttgttgaatgttggtgtaattcatccattcgtattgctatatgatattccactacatgaatatgtcggacttcattcctcagatctattgttgatgaacacttgaaatttttccagtttttaaccattacaaacaatgctgctatgaacattcttttgtaaatcacctggttcatatgtgcaagatatcctctggggtatatatttaaaagtaaaattattgagttattcaacattaccatgagatgctacactattttttttaacaatcctaccaatttacacttctaccacgaacagataagcattaccgttggtcttcatttgtaggaaccatatttgtcttttgctctgggggctttgttttgttttgctttgttttttgcttagaagtgctttggctattagggatctttttttggctccatgtgaactttaggatttttttttaattttgtgagaaataacgttggtaatttgatgggaattgcattaactctatagattgtatgggtgatatggtcactttagctattgatttttctaatccatgagcatgggatgtttttccatttgtttatgtcatctataatttctttcattagtattttgtagttctctttgtagagatctttcatttatatagttatgcattcctaggtatttttcatggctattgtaaattcagttgagttcttaatttggttctcaacaaattaatctcaacaaacattcaaacagcttgaatgtatttggtgtatagaaatacaactgatttttgtggcttgtttatcccaagactttactgaagtcgtgtatcaagtctaggagtcttctgaagactttagggttttctaggcctacagtcatgtcatcagtgagcagagatcatttgacttcttttctaatttgtataccttttatttctttctcctttctgatagttctggctagcacttccagtactgtattgaataggaatgaagaaggtgaacatccttgcttttttccagtttctagaagcaacacttctaacttttgcccatccaggatgatgttggctgtggctttgtcatagatgactcattttttgaggtatactccatctatacctatattgttgagggtttttatcataaacagatgttggattttatcaaatgcttattctgcatctaatgagatgatcatagggtttttgttctcagttccatttatgtggtgaatcatgtttattgatttgtctattttgaaccattcaagcacccctggaataaagcccgcttgatcatgatgaattatctttttgatgtgttgttagcttcagtttgctagaattttgttgagtatttttacatctgtgttgatcagggataaggatttgtagttttcttttgtgttctttttaaaattttccttgttaattttactgcacagtattattttaatgatgaataaagtgttgagctggacatgtgtaccttgttcctcgtgttagaatgaaactgtttaatatgtcatgattatttataatgttgagagtagtttttgtgtatatattaagatatttacatcagttctcttctattcctagtttgttattattacaaatagtttcaaatgtgaacaagtgcttttcccacagctattgaaataaccatatttttttcttttattcagttaatgtggttaatttcattgtttggttttctaattttaaaccatacattcttgaaattactgcacttagtcacgatgtatttttctttggagtatattgttggattatatttgcaaacatttttgtttagaattattatgtagtatattagtctgtaatttcatttcttttaatatccttgtatggttttactatcatggaggtaccaccatataaaacaagttggaaagtgttatgtcttcccaattctctaaaaatattcatgtaacattggcattatttctttattaaatatttggtaatatttctttattaaatattgcatccacctagccctggagttctttctacaggaaaaaaaaattttctaaataaaatttctacaatgaaaaaaaaactactcagtttttctagtttttttctgatcatttcataaaagtaggtatttttcataggaacttgaccattccttatgattgtcaaatttattaatataaagtttcatattttatatttattttatcagataaataaaattatatgttttgaaatatatattcattgtaaaatagccatgttaagctaacatatgcattaccttacatgcttatctttttttatgagaacacttaaaaatctactcttagcaattttgaagaatacaagtacatcccctatggagaacagtttgaaggctcctcaaaaaagtaaaaatagagctaccatgtggtccagcaatcccactgctgcatatataccccccaaaaaagaaatcagtatatcgaagagatatctgcactcccgtatttgttgcagcactattttcaatagcgaagttatggagtcaacctaagtgtccatcaacagatgaatgaataaagaaaatgtggtacttatatacaatgaagtattattcagccataaaaaggaatgagaccctgtcatttgcaacaacatagatgaaactggaggtcattatgttaagtgaaataagccaggcacaaaaagacaaatactatgtgttatcacttatatgtggaatccaaaaagcaaacaactgaactcatggagatagagagtagaaggaagtataccagaggctgtgaagggtagtgggggttgggagaggtgggggatggttaatgggtacaaaaaaagaaagatttaataagacctagtatttgatagcacaacagggggattgcagtctaaaattcaattatacatttaaaaataactgaaagagtataattggattgtttataacacaaataataaatgcttgaggggatgaatatccaattttccattatgtacttattgtacattgcatgcctgtaccaaaatatttcatgtaccccataaatgtgtacacctgctatgtacccacaaaaattaaatttaaaaacaatacattgttatccactatagtcaccatattgcacaatagatctgttgaattcattcctcctgtacaatgcaattttgtaccctttgaccaacatctacccaatcctcctggtaaccatcattctactctgtacttctatgtgttcagccttcttagacctccacatacaagtgagattatgcagtatctggctttctgtgcctggattattttactcagtataatgtcctcccggttcattcatgttgtcacaaatgatactttttttattttttaaggttgtatactattctattgtgtatgtgtgccacattttcttcatccactcatgtgtcgatggatacttaagttaattccacatcttggctgttgtgaataatgctacaataaatatgggagtacagataactcattgacacactgatttgatatctttttaatatatgcccagaaatagcattactgaatcatatggtaattctatttttacagaatcatttatactgtcttttacaatggctgaaatagtttacattctcaacaattacaaggttttccttttctccacatcctctccaacacttggtatcttctgccttttctgtaacagccattctaacggatgtgaaatggcattttattgtagttttaatatgcatttctctgatgatcagtgataattagcatttttatatatctgttggccatttgtatgtcttcttttgagaaatgtctatttagatcctttgtcaatttttcattagggttccttgttttcttattattgtgttgtttgagttcctaagatattttggacattagcctcttatcaaatgtatagtttgcagataatttctcccattttgtaggttatcacttcactctgttgactttcttttgctgtgcagaagctttttaggttgatgctattccatttgtgttttgttgcttttcttgcctgtgctttagagtcatatcataaaatattattgcccagaccaatgtcttggagttattcccctgttttcttctaggagttctatagtgctaggtcttacatttaagtctaacttattttgaatttatatttttatatggtatgaaataagggcctaagatcaatcttgtggacattcagttttctcaacaccattttttgaagagactgttctttccccatgtgtgttcctggcacctttgttgaaagtcaattgactataatatgtagatttatttatgggctctttattctgtgtaattggtctatgtgtctgcgtttatgccagtaccatggtgtttcgattgctatagctatgtagtataatttgaagtcaggtaatgtgatatctcctgccttgcttttttcgatcaagattattttggcttttcagagttttttgtgattccatacagatttgagagttgtttttctatttctgtgggaaaatgtcataggaattttgatagagattgcattcaatatgtacatcactttggatagtatggacatttcaaacatattactttttccaatccatgaacatgagatatctttccatttatttgtggcttcttcaattgttttcatcaatgttttgtagttttcagtgtaaagatcattcacctctttgtttaaatttacatctaagtattttttgttgctattataaataggattgttttcttgatttctttttttgtatagtttgttgttgatgtgtagaaatgctaccgaattttgtatgttcacattgtatcctgcaactttactaaattcatttatgaattctaaattttttggcagagttattggtgttttctgtatataagatcatgtcaactgcaaacagaaacaatttaacttcttcctttccaattttcatgccttttatttctttcttttgcctaattgctctggctaggacatccagtactatgttgaatagaagttctgagagtgggcacccttgtatgaagttttccacaacatctcttatctttttattagctatatattaatacggatgtttcttcttcatcaggagtttgaaaaatatgtcttttctctatattgttcttaatcagtcttcctagaagtatttcaatttcaaaaagtagcaacaactgtgggagttcagtcaggctggtgggaaaaattttaaagatagttataagaaatcgacacaaaccttcatggaaggctgggggtgttgtatagcttcagtaatagatctgaatgaaggcggcctaatccttccttgagtaaatagcttaaagtaggtgcaaaggaatgtaagggagtttatctaaataacttgtttactcatgtggtcctgaagccaacctttgatcattcacaggcaggatggctctctctcgggggagggtgaccaggttaattaccctctatttgtgttgactaaaagcccctgtcatttaatgttttttcaataaatgctggcagggctagctagtcagggctcgtggctgccagaactctttctgtgcatggcccagccccctagcggctctttcactgaataattggtgtctgagtacattattcatccctcgtgcagctggggtctgcaggacagacccccacaaacaacaatttgcaaaagcaaacttccctgttttgtttttttcccaagatgataaattagaggcttttagtgtgcctcggccacttagaaatagcaagagagtgcacaaaggtcaactctgtgagctctaagtcaagaaggaaaatgggaatccaccagaatcatgaaggacatcatagatcccaagaaggagaatgtgagcaaacagtcaacatgacagcaaccagcttataaaagtgagcgaagtcctagtatgtgagagaggcagagagcctccctctgtaactgacattttcactgtgaatctgagcaaccccagccaagttgttgcattttgtttctcccaaggcctggagtcaacatggggagaggcttggagatgctgtgaagcaaagacactgggaacagctgcagacattttcccagaccaggaagtaagagcaagatgccattttcaatctggatgcatgcaaagtcagcttttttttttctttttgtgacccagcagaatgcctgcacaggcattttagtctcaggccaaagattggaacaactgctttggggcttggtagggaccttcacagccatattgtggaaaacacctcagcagtatgtgctggaattgtgctttcccccatcgcagcctcggggcaacagaaaagctgctacagctgtaatttctcccaggtgatgaaacttgcagccagggccagcttggagacctacaaccagtctgcaggtgtcattgctgggtgccccagcctgttcccctgagaatgtgatacagcagggctttctctgcttcacccccaggcagaaattcaggcattggagcacctgtctacctggaccagcatcctgagctaccccaccgtttataaacataggttgtggtgcagtggggccctctccagtctatggccaggcagatttccaggtatgtggagtacccacttgactggatcagcagcctgagcttccccaaccttcctgtgctgagattatagtgcagtgaggccctctcatctccacacataggcagacctccaagcaattagagcacctgctcctatggagaacttaaatttacaagaaaaaaaaaaaaccatcaaaaattggccaaaggacatgaacagacaattctcaaaagaagacatggatgtggccaacaaacatatgaaaaaaagctcaaatcactgatcattagagaaatgcaactcaaaaccacaatgagatactatctcaaaccagtcttaatggtgattatcaaaaactccagaaacaacagttgctggtaaggctgtggagaaataggaatgtttttacactgtttgtgggaatgtaaattagttcattcactgtggaaggcagtgtgaaaattcctcaaagatctagaaccagaaatgccatttgccccagcaatccctttactggatatatgcccaaaggaatataaatcattctattataaagatacatgcacagggctgggtgcagtggctcacacctgtaatcccagcactttgggaggccaaggcgggtggatcacctgaggacaggagtttgagaccagcctagccaacatggggaaactccatctctactaaaaatacaaaaattagccaggtatagtggtgcacacctgtaataccagctactttggaggctgaggcaggagaatcgctggaacccaggaggcagaggtcaaagtgagccaagatcataccattgcactccagcctgggcaacaagagcaaaactccatcttaaaaaaatatatatatatacatatacatacatatatatacacatatatatacatatatacagatattatatatgtaaatgtatatatatgtgtatatatatacacatatatatacatattataactacatatatatacacacacacatacatatacatgcacacatatgtttattgcagcactatttacgatagaaaatacatggaatcctcccaaatgcccatcaatgatatattggataaagaaaatgtgatatatattcaccatggaatactatgcagccgttaaaataaatgagatcatgttctttgcagggacatggatgaagctggaagccatcaccctcagcaaactaacacaggaaaagaaaaccaaacaccacatgttctcagtcgtaagagggagttgaacaatgagagcaaacacatggatacatggaggggaacaacacacaccagggcctctcagcgggacaggggtaggagaccatcaggacaaacacgtggatacatggaggggaacaacacacaccagggcctctcagggggacagggggtaggagaccatcaggacaaacacgtgggtacatggaggggaacaacacacaccagggcctctcagcgggacagggggtaggagaccatcaggacaaacacgtgggtacatggaggggaacaacacacaccagggcctctcagggggacagggggtaggagaccatcaggacaaacacgtgggtacatggaggggaacaacacacaccagggcctctcagggggacaggggtaggagaccatcaggacaaatagctaatgcatgcagggcctcatacctaggtgatgggttgatgggtgcagcaaaccaccatggcacacatttacctatgtatcaaacctatactttctgcacgtgtatcccagaacataaaataaaatttaaaaaatatatacactgattcatgatctcctttctctccttctgaaacactctttaaaactttttagcatttccccctctgtcttccatgtctcctaactacatgtttcttattttccatgtctttattcctgtgttcattttggatagccccttctgacctatattacagtttactagttcactcttcaactgcttctaacatactaatattctgttaaaaccattcatttgggtttaaatttcaattatgttattctctatggacattctatttgttttcttttaatcttcttggccattctctagagtttcctgttccattatgatatttttaattttttgttttactttaaacatactaaatatagttattttattttattttctgtatctgatactttcaataactgcagtctttgctagtcttttttctgtgctcttgctcatagtttttttcatttgttttcatgattagaaaaacagagagagaagaaggagagtaaagggaggaggcggaggaggagaaaagaagaaagcagagaagaagggacagagaaaaaaaggaagttggttctaacgtttctctaacaactggcttcagtgaaacactcccaccttgtggatttttaggttattgaaattaaccagtcttctgggtgcagcacaccaacatggcacatgtatacatatgtaacaaacctgcactttgtgcacatgtaccctaaaacttaaagtataataaaaaataaaataaaaagctacacaaatttaaaaaaaaagaaatcaacctaattcctagattaccacctcttgattcaaatgctttaaatctaggcttttcatctgagtctttctttttagttattctgtttatcttcaaaacactcctgctttgaatcattcaaaatctacctccctccctctgtttgactaccatcaatttttttgctcattcctaatgcattaatctattagctgtgaatatccaaaaaccctcatttcactgaatctttgacagacccctttgcatcctcttgttcttctaattatttcctcagaaactttatgttctcttttctttacaagcatgtcatagtttatatataatgtgtgtattgtttttatatatacctatatatagcctctttttaaaagcactatacaccatgctttgaaatatattctaaaatcaggtagcatgaaaatggaaacataacatactaaaacatatgggatgcaacaaaagcagttataagagggacatttatagcaataaatgcctacatcaaaaaagaaaaaaaagatctcaaataagcaacctaatattatgcctaaaggagcgagaaaattagagaacaatacaagcccaaagatagcagaaggaaacaaataacaaagatcagagcagaaataatataatagaaactgaaaatttcaataaaaataagaattgttttttgaaaagataaacaaaattaacaaattcttacatagactaagaaaaaagaaaacaaactcagaagtgaaagaagagacattacaactgataccacagaagttaaaaaatcataacatactactataaacaattattcaccagcaaattagataacctagaagaaattgataaactcgtaccaaaactgaatcatgaagaattcaaaatttagaagaaatcatgaataaggaaattaaatcaccaatgaaaggtctctcataaaagaaagaccaaggattgaatggcttggtggctgaattccaacaaacacttagatgactaacaccaatccttcccaaactcttccaaaaaaaatgaagaagaggaatactttcaaattcatttttcaaaaccagcattaccctgataccaaaaccagagaaggacactataataaaaataaattgcagaccaatactcctgatgaacttggatggaaaaaccttcagccaaatattagcaaatattatttttaaaaaaaaacagcaaaaaaattcaccagcttaagtgggattcatccctgggaagcttattagtcttatttgattcgtgtaatcagaaaatttctatgtctagtgaagagaaatgagagcaatagagactcatagcacctcaacaaatgtccaggcttgagccagttaacaaatacaagtccttcaaatacaaaaaagactgtgaaagaaaatagaacagatcaatgagactaagaatttgttctttgaaaagataaaactgacaaaccattagctagactagaaaaatgagagaatactcaaagcaataaaatcagaaatgaaagaggaaatattgcaactaataccacagaaatacagaggatcataagaggccactataaacaattacaagccaacaaattggataacctagaaaaagcagataaatttctagaaaaatgcaacttacctagagaaagtcaagaagaaagataaaatctgaacagaacaatactgagtatggagagtatatcaataataaaacatctcccatcaaagaacatcccaggaccagaaaacttcattgctgaattctaacattttaaaaaataataatacaatccttctgaaattcttccaaaaacttgaaggagaaagagtatttccaaactcattttaaaagatcagcattattgtttttttttaaagtgatgttccccttcctgtgtccatgtgttctcattgtccaattcccacctatgagtgagaacatgcggtgtttggttttttgtccttgtgattgtttgctgagaatgatggtttccagcttcacccatgtccctacaaaggacatgaactcatcattttttatggctgcatagtattccatggtgtatatgtgccacattttcttaatccagtctatcattgttggacatttggattggttccaagtctttgctattgtgaatagtgccacagtaaacatacgtgtgcatgtgtctttatagcagcatgatttatagtcctttgggtatatacccagtaatgggatggctgggtcaaatggtatttctagttctagatccctgcggaatcgccacactgtcttccacaatggttgaactagtttacagtcccaccaacagtgtaaaaatgttcctatttctccacatcctctccagcacctgttgtttcctgactttttaatgatggccattctaactggtgtaagatggtatctcattgtggttttgatttgcatttctctgatggccagtgatagtgagcattttttcatgtgttttttggctgcataaatgtcttcttttgagaagtgtctgttcatatcctttgcccactttttgatggggttgtttgtttttttcttgtaaatttgtttgggttcattgtagattccggatattagcactggggcctgttgtggggtggggggaggggggagggatagcattaggagatatacctaatgttaaatgatgagttaatgggtgcagcacaccagtatggcacatgtatacatatgtaactaacctgtacgttgtgcacatgtatcctaaaacttaaagtataatttaaaaaataaataaataaaaataaaaataaaaaggcaaacaaggacactataagaaaagtatgggccaaccaatatccctgatgaacacagatacaaaagtcctcaaaaaaaagtactagcaagcagaatttaacaacatattaggagaacatttaccatgataaagtggatttatcctccagatgtttcagcaaacacaaatcaaatgtgataaaccacattaacagaatgaaggataaaaaaatagctatctctatatatgcagaaaaagcatttgactaaattcaaaatcctctcatgactaaacctctcaacaaattgggcatagaaggcatgtaccttaacacaaaacaggacatatataacaagctcacagctcacatcatacccaacaatgaaaaagtgaaatcttttctgctaagatcaaaaacaagacaaggatatttattctcactacttctattcaacttatttctggaagtcctagccagagcaattaagccaaataaagaaataaaagattcaaattgaaaaggaagaagtaaaattgtctctgtttgatgacatattatatataggaaaccctaaaaactccaccaaaaagctattagaaatgataaatgaattcaataaaatttcagaattcaaaatcaatgtacaaaactcagtagtttctttacactcacaacaaactatatgacaaaaataaagaaatcaatctcattcacagtagcatcaaaaaaaacgtattttttttgtttaggagcacatttaggattgtacttaggagtacatttaaccaaggaggtgaaagatctgtattctgaacactataaaacattgatgaaaaattgtagatgacacaaatacatggaaagatattttatgttcatgggtaggaagaattaatattcttaaaatgtccttactgcccaaagcgatttataggtttaatgcaatatttatcaaaatttcaatgtcattcttcacagaaatagaaaaaacaatttgaaaatttatatggaaccacaaaggatcctgaataactaaaggactcttgagcaataagaacaaagctgaaggcctcacaatctgacttcaaaacatattacaggaaaagaacaaaagaaggaagaagagggtagaggagaagtgcagcaagggtggagggaggtgcccacgctgggtcggaggagcaggaggagtatggagggaagactcctgggtggcatggagctcttgcacctctaggcactgcccagccctgtgtcagccagggctgaacccccacaggataaggaagcctgtgtgtgtaccaacaatcaaagctacatctgtgacacaacaggacactgctatgggcagtctcagtgttgtaactactactatgaacattggtggttctggctggcgtggaccatcaccatcatcctgagctgctgctgtgtctgccaccacagccaagccagccctcaagtccagcagtagcaacatgaaatcaacctgactgcctatccagaagcccgcaattactcagtgctaccattttatttcaccaaactatttattaccttcttatgaggaagtggtgaactaacctccacctgtttccctccctgtctgtccattgtggatgagctctgagccctgttttcctgtgaagattctttgaattgcagccattctattcacatgaactctcacatctggagcacagatggccctctcaaggtaatttattgtatgcattgactgtttaccaaacaaatgtcttactatgtactcaggtatattcagcagcattgtcgactgcagtcccctatgcttgccagaagatactgtattcaaagtagaagtttcacagtgatgagtaatcactgcaattttcccattgctccatggactctcggaggccggtgttctgttccctgtaaatagagatgtactctgaacctttctgcctccctcagctgttcctagtccttggtatcagcccctggagatgtccacaaccacttaggacaaaaggcaaaagtggaatttcagacaaaactttgataggatcttcagtgataaacttggactaactgtggcccaggtatcagcactcccaagaattgccaggaggaagctttggcagacaccacaggtatggcaaggcctatctccctctgctgaatccaacaggggcaagcaagctggcatgtggcttgaggtgacccgaatatgtcagcacccctcagatgtctttctttgcacttttgaaaaaaatctcagaatttgctggcaacatggccaaataggaacagctccagtctgcagctcccagtgagatcaatgcagaatgcaggtgatttctgcatttccaactgaggtacctggttcatctcactgggactggttggacagtgggtgcagcccacggagggtgagccaaagcagaatggggcattgcctcacccaggaagtgcaaggggttgggggaattccctcccctagccaagggaagccccgagggactgtaccatgaggaacggtgcactccacccagaaactatgcttttctcatggtcttcacaatccacagaccaggagattccctccagtgcctctgccaccaaggccctaggtttcaagcacaaaactaggcagctgtttgggcagacaccgagctagctgcaggaggttttttttttttcatgccacagtggcaactggaatgccaacaagacagaaccattctctctcctggaaagggggctgaagccagggagccaagtggtctggctcggcaggtcccacccctacagagcccagcaagctaagatccactggcttgaaattcttgcacagcagtctgaggttgacctaggacactagagcttggtggggggaggggcttccacattgccaaggcttgagtaggcagttttacccccactgtgtaaacaaagccaccagaaagtttgaactgggtggagcccaccacaactcagcaaggccacagcagccagactgcctctctagatttctcctctctgggcaaggcatctctgaaaaaagggcagcagccccagtcagagacctatagataaaacccccatctccctggaacagagcacctaggggaaagggcggctgtgggcacagcttcagcagacttaaagcatctttgaaaagcctgatggctctgaagagagcagcagatctccctgcacagtattcgagctctgataagggtcagactgcctcctcaagtgggtccctgacccccgtgtatcctgactgggagacacctcccagtaggtgccaacaggcacctcatacaggagagctctggctggcatctggtgggtgcccctctgggacaaaacttccagaggaagaaacaggcagcaatcttggctgttctccagcctctgctggtgatacccaggcaaacagggtctagagtagacctagggcaaaccccaacagacctgcagcagaggggcctgactgttagaaggaaaactaacaaacaaaaaggaatagcatcaacatcaacaaaaaggacagccactcagtgaccccatcagaaggtcaccaacatcagaaaccacaggtagataaatccatgaagatggagagaaaccagagcaaaaaggctgaaaattccaaaaaccagaacgcctcttctcctccaaaggatcacaactcctcaccagcaagggaacaaaagaaaactggacagagaatgagtttgacgaattgagagaagtaggtttcagaaggtaggtaataacaaactcctccaagctaaaggagcatgtcctaacccaatgtaaggaagctaaggacctggaaaaaaggctagaccacttgctaactagaataaccagtttagagaagaacataaatgacctgatggagctgaaaaacacgccatgagaacttcatgcagcatgcacaaggatcaagcactgattcggtcaagcggaagaaagatatcagagactgaatatcaacttaatgaaataaatcaagaagacaagattagagaaaaaagaatgaaaagaaatgaacaaagcctccaagaaatatgggactatgtgaaacgaccaaatctacgtttgattgctgtacctgaaagtgatggggagaatggaaccaagttagaaaacactcttcgggatattatccaggagaacttccctaacctagcaaggcaggccaatattcaaattcagaaatatggagaacatcacaaagacactcctcaagaaaagcaaccccaagacacatagtcatcagattgagcaaggttgaaatgaaggaaaaaatgttaagggcagccagagagaaaggtcaggttacccacaaagggaagcccatcagactaacagcagatctatcagcagaaactctacaagccagaagagaatgggggccaatattcaacattcttaaagaaaagaattttccacccaggatttcatatccagccaaactaagcttcataagtgaaggagaaataaaatcctttacagacaagcaaatgctgagagattttgtcaccaccaggcctgccttaaaggagctcctgaaggaagcactaaacatggaaaggaacaactggtatcagccactgcaaaaacataccaaattgtaaagaccgttgacactatgaagaaactgcattaactaacagcaaaataaccagctagcatcgtaatgacaggatcaaattcacacataacaatatcaaccttaaatgtaaatgggctaaatgctccaattaaaaaacacagactggcaaattggctaaagagtcaagacccatcagtgttctgtattcaggagacccatctcacgtgcaaagacacaaataggctcaaaataaagggatggaggaatacttaccaagcaaatggaaggcaaaaaaaagcaggggttgcaatcctagtctctgataaaacagactttaaaccaacaaagatcaaaagagacaaataagggcattgcataatggtaaaaggatcaatgcaacaagaagagctaattatcctaaatatatatgcacccaacacaggagcacccagatgcataaagtaagctcttagagacttaaaaagagacttagaccctcacacaataatagtgggagactttaacaccccactgtcaatactagacagatcaacgaaacagaaagttaacaaggatatccaggacttgaactcagctctggaccaagtggatccaataggcagctacagaactctccaccccaaatcaacggaatatacattcttctcagcaccacattgcacttattctaaaattgaccacatatttggaagtaaaacactcctcagcaaatgcaaaaaaaaatgggaatcataacagtctctcagatcgcagtgcaattaaattagaactcaggattaagaaactgactcaaacccacacaactacatgtaaactgaacaacctgctcctgaacaactactgggtaaataaagatattaaggcagaaataaataagttatttgaaaccaatgagaacaaagacataacataccagaatctctggtacacaattatagcagtgtgtagagggaaatttatagcactaaatgcccacaagagaaagcaggaaagatctaaaattgacaccctaacatctcaattaaaagaactcaagaggcaggagcatacaaaaagctagcagaggacaataaataactaagatcagagcagaactgaaggagatagagacacaaaaaaaccttcaaaaaaaaatcaatgaatccaggagctggttttttgaaaatatcaataaaatagatagaccactagccagactcataaagaagaaaacagagaagaatcaaacagatgcaataaaaaatgataaaggagataccaccactgatcccacagaaatacaaactactatcagagaatactataaacacctctacacaaactagaaaatctagaagaaatggacaaattcctggacacatacgccctcccaagactaaaccaggaagaagttgaatccctgaatagaccaataacaaggtctgaaattgtggcagtaattaatagcctaccaaccaaaaaacagtccaggaccagatggattcacagccgaattctaccagaggtacaaagaggagttggtaccattccttctgaaactattccaaacaacagaaaaagagagaatcctccctaactcattttatgaggccagaataattctggtaccaaaatttggcagagacacacacaaaaaaaagaaaatttcaagccaatatccctgatgaacatcgatgcaaaaatcctcaataaaatactggcaaaccaaatccagcagcacatcaaaagcttgtccaccacaatcaagtcggcttcatccctgggatacaaggctagttcaacatacgcaaatcaataaacataattcatcatataaatagaaccaatggcaaaaaccacatgcttctctcaatagatgcagaaaaggccttcgacaaaattcagcagcccttcatgctaaaaactctcaataaactaggtactgatggaacatatctcaaaataataatacctatttatgaaaaacccacagccaatactgaatggtgaaaaactggaagcattccctttgaaaaccagcacaagacaaggatgccctatctcaccactcctattcaacgtagtattggaagttctggccagggcaatcaggcaagagaaagaaattgtctctgtttgcagatgacatgattgtgtatttagaaaaccccatggtctcagcccaaaatcttcttaagctaataagcaacttcagaaaagtctcaggatacaaaatcaatgtgcaaaaatcaagcattcctatatgcaaaaaacagacaaacagagagccaaatcatgagtgaactctcccattcacaattgctactatgagaataaaatacctaggaatccaacttacaagggatgtgaaggacctcttcaaggagaactacaaaccactgctcaaggaaataagagaggacacaaacaaatggaaaaacattccatgctcatggataggaagaatcaatatcatgaaaatggacatactgcccaaagtttttatagactcaatgctatccccatcaagctaccactgactttgttcacagaattggaaaaaactactttaaatttcatatggaaccaaaaatgagcccgcagagctaggacagtcctaagcaagtagaacaaatctggaggcatcacgctgtctgacttcaaactatactacaagccttcagtaaccaaaacagcatggtactggtaccaaaacagatatgtagaccaatggaacagaacagaggcctcagaaataacgccacacatctacaactatctgatctttgacaaacctgacaaaaacaagcaatggggaaacgattccctttttaataaatggtgttgggaaaactggctagccatatgcagaaaactgaaactggatcccttccttacaccttacacaaaaattagctcacgatgtattaaagacttaaacataagatctaaaaccataaaaaaccctagaagaaaacctaggcaataccattcagtacataggcatggacaaaaacttcatgactaaaacaccaaaagcaattgcaacaaaaaccaaaatagacaaatgggatctaattaaactaaagagcttctgcacagcaaaagaaactgtcatcagagtgaacaggcaacctacagaatgggtgaaaatttttgcaatctatccatctgacaaagggctaatatccagaatctacaaagaacttaaacaatttacaagaaaataacaaacaaacccatcagtgggtgaaggatatgaactgacatttctctaaagaagacatttatgcagccaacaaacatatgaaaaaaagctcatcatcactggtcatcagagaaatgcatatcaataccacaatgagataccatctcacgccagatagaatggcgatcattaaaaagtcaggaaacaacagatgctggaaaggatgtggagaaataagaatgcttttacactgttggtgggagtgtaaattagttcaaccattgtggaagacagtgtggtgattcctcaaggttctagaactagaaatatgatttgacccagcaatcgcattactgggtatatatccaaaggattataaatcattctaccataaagacacatgcatacatatgtttattgtggcactgttcacaatagcaaagacttggaaccaaccaaaatgcccattcaatgatagactgcataaagaaaatgtggcacatatacaccatggaatactatgcagccataaagaaggatgagttcatatccttttcagggacatggatgaagctggaaaccatcattctcagcaaactaatccaagaacagaaaaccaaacacccgatgttctcactcataaatgggagttgaacaatgagaacacatggacagagggaggggaacacaacacaccggggcctgtctgggggtaggggctaggggaaggttagcattgggttaaatacctaatgtagatgatgggttgatgggtgcagcaaaccaccatggcacgtgtatacctatgtaacaatcctgcatgttctgcacatgtaccccagaacttaaaatataatttaaaaaaaaatctcaaacaactcactgaagtgtctcaaagctgaacaagttttaccaaaatgaatccttctcagttaactgatcaaatggatgaatcctgaccctctgaagtctctttcctgagttagagcagggaactgctctgagtgttaactgttggattcactgcagtgtcctacaatattttacaagaagatgaaaaggcaacctgcagacctaggcttgattcccaagtcacagtctgacccctgctacaggaggttaccctcctcaggaagagatagaaatagggaatttgaaggaatagtgaggggaccagggagatttgattgagtctggtttccaggtgaattaaaaggaagggtgtcatccagggtttgttgctacagtcaaaagaataaataaatcaatgaagaaataccttcattgtctgtggttttcatgcagatatactcatggaggttgtatctctccaaaaacagacaaatccaaggctgtgaacaagcatccgcatttgaattccattaaaccaaaatctatgttgaacgaagtgaagtctgtacacagcattgcaaatgtgaacacattcctgtgtgaggcacatcaacatttgtcagttattgtgaatatgtgtatttttaagcaataagatgcagctggtcagttttctgggcaatcttggcgatgcatttcctgtgctgtggttgttctctaaccactgtgagaaacccaaataaaaatcgatccccccccaaaacaaatacgtatcacaaaaccatagtaatcaaaacaacatgacacttgcacaaaaacagacacattgaccaggggaacagaataaggagcccagaaataaactcatgcatttatgaccaataaatttttgacaaaggtgcccagaaaacgtaatgaagaatagacatttgtttcaataaatggtgttaagaaaactagatatccacatgcagaagaacacgaatgtgtatggtgtgtatccttatctcacaccatacacaaaaatcaattcaaaatggattaaaggtttaaacataaaactgtaaaactactagatgaaaacataggggaaaagttccacaatgttggtttggtcaaagatttcttggatataacccccaaagcacaggcaacaaaagcaaaaatatatgggattgcatcaaactaaaaagcttctgcacagcaaaggaaacaatatggtgaagagacaacctacaagttgtgagaaaatatttgcagagcatacatctgatgaaaggctaatctccaaatatataagggactcaactcaatatcaagaaaacaaataaccaagtcaaaaaatgggcaaggtcctaaatagacatttctcaaaaaaaatacaaatgactaacataaaaaaagtttgtcatcctaattatcagggaaatgcaaattaaaatgacagtgagatgccacttcatacctgttagaatggctactatcaaaatgataaaagataacaagtgttgaagaggatacagagaaaagggaaccctcgtacactgttggtggaaatgtaaattaatactattatgaaaaatagataaaagttactcaaaaaactaaaactagaattactatatgatccagcaatcccacttccttgtatatatccaaaggaatttaagtcaatatgctgaagagatatctccaggctcatgttcattgcagcattattcacaatacccaaatatgaaatcaacacaggtgtctatcaactgacaaatggatgaagaaaatgtagtgtatatatacaatggaatactactcagccttaataggaaggaaaacctgatatatgtgacaacatgaattaacccagaagatatcacgctaagtgaaataagccaggcacgaaaagacaaatatcacatgatctcactgatatgtggaatctgaaaaagttgaattcatagaagtagagaatggaatggtgattatcagaggctaggagttgggggtagacatggaaaaggtagatgttgataaaagggttcaaagtttcagttagacaaagtttcagtgaactattgcacagaatggtgactgtaataaataacaaggtattgtatgtttcaaaatgactaacagagtagattttaaatgttttcaccacaaaaaagatatgtatgtcaataagatagacctaatctttccacaatttaaacatgtatcaaaacattacattgtaccccatagatacaattattatttgtcaatttaaaatttttcactaatttatattgttattgttgcaccaactcctttccaccaggcagattctcataaagactattttctctcttacatgaagcatttcctacacacctcttaatcacggtagcattgacatcattccaccagattctatctccagtgttaaaataatcaagaacccagaaatctccaccagggggcaaccaatgcgtatcaaagtttcccactttcctttagatttacttatgggtaacttatgggaaaaaatacttaagtacttccctttttaaagaaaaaaattatatgaattctacaaaattatggcagaaaatttaagaagagcagatgcttcccaactcattctaaagggccagcattaccctgattctgaaatgaaaaagctttacaaaatccaagatccattcctgactaaagataaaagaaattttcagcaaactgtgaatacagaaaactttctcagcctgttaaagagtacctatgaaaaaaattatagctaacattatacttaatgatgaaatatttaatatatttcataacaggaacaagtcaaagatgtctgctctaactaattctactcagcattcaacaaaatgaatatagtgaattcatactagaattttaaaagcaaatgtctttattcactgacaacataatcatctataaagaaaatcctacataacctataaaaaactgatggaactaataagttttgcaagtttacaggatataatgtcaaacaaagatctattatgtgcccataagctaagaataaacaattgtaaattgaaataaaaatgtcacttaaaagggcatcagaaatataaaacttagagataaatataaagtacatatgcataaagtacctgttcaccaaaaactacaaaacattgctgaaagaaattaaatgggcataatatagatgtagagatgtgttgaatttatgactcattttgaacaaggaatatattcatcatatattcatcagataagaattatgttacaggtctaataacattcaaatcaatacataatgtctcatagttcctgaatctaaaatatcaaagaaagaaacataaagccatatcatgtttaacgagaagggcttattgtatcatttatgagatcttcttgtaaatcactagctgtttgcatactctctttattgctgccttcatctccttattcctgaatgtatagacaactggattcagaaaaggagtgagaactgcatcaaaaatagccagaaacttgtccatctgtgaattagggtgtggccatgtatacacaaacatgggtggaccaaagaacaaaaggaccgctgtgctgtgagctgaaagagtggaaagggccttggatgaaccacctgaggaatgtttccaaacagtaaacaggatgaagacgtaggagattagaagtatgaagaaagtacccacacagataaacccactgttaacagtgaccatgaactgcaatctgtaggtgtcggtacaggctagtctgagaagctgaggaaggtcacagtagaagctgtccaacacattagggccacagaagggtaaattaacaagaaatgccagttggaacagggagtgactgacaacaagggtccaggcaacagccagaaatgaaaggcacattcttgggctcataatggtcagatagtggaggggcttaatagggccacataactgtcaaaggccatggctatgagcagcaccatctccacaccaccaatgacgtggatgaagaagatttgagcgatgcagcctccaaaggagatgactttgcgctttctgaacaggtcataaatcatcttgggagaagtgacagagcaggctcctaagtcaatgaaggagagactgaccagtagaaagtacatgggggagtgtaagtgagggtcagtggtcacagaaaacacaatgaggatgtttccagtaatgcttgccacatagagcacagaggaaaacactaggaggaggagctggatctcccatgaatgagtgagtcccagaaacaaaaactcagataccactgagtgattctctccatccattggtccagccaactgggctgtggctaaaattatgagaactaagaaaatggggaggaaattgtgattatgaagataatatgtactaaaatcaatattgcaatgtcactatgaataaatagtatacagttattctgttcctcacatattaaaaacaaaaaatcaacataatattatcacaacatgtgagctgcaacctgatttaaacccatcatcaatactttcagtgtaatgtctgatctaaaattaacagattaggtaagaacaagattcctgactatccatgaaattcatcaggtgtttaaatgacctgcgatattaactattcctcatttccaacatattccatttgtacttatacatattcttataatttccttcccttcccagtttgcagccacaattctctgacagaaagtagacataagaggaaaacatgattaacagatggattatcacctgcagtaagaggtgcctgggacggacttagttgaggtaggctgtggattgagacagaatatagagactggggtatgtgaaatcggaaagcccacaactgtagcagaacagagtaagtggactttcacaagaaatagaatcaccaccattatctaccacattttctcctgctcactgctatttaagtgcctcagtttctatacaatctttcacaattacgaagccctaaatggcttcccatcctgcagtgatttcataaggagcctatgccacctgtcatgtaaggctttttccatgcctaataaatatgttttggagggatttcaccagagtttttgctaagatgcataaaatggccacagaggttgtgagaaatctctgcagtttctctttgtctatacacatgaaagtattgaagaccagcacttggattagttaagataatgttttaattcatcactgtctcctcctccccttggtaccagcttttatgttcattgcattccccacccttttaagtactcagtacctcctgcatggtaacctattctgatatttgatattatcatgcttaatttgactgaatccatttggatattttatctttaagaaatttgtagttttatacttttaatttatgataaaattagattaatatcaaacattaacaagtgacttttaggaaggtatatgagctttcttattgacttcaaactataaagtacaaactgtgacactagaaatttagtcctttaacacatgttgtatttatatgtgaagtggagggtgagcagaaaacagtgttatatttctctgtgtccagatggatactcacctcaatcattttcctatagtagaaagtagttcctgaaaacacttaatagagattattttagaagttgctgaggtacaaataaaactgctatgctgacatacttttttgcaccaacaactccagttcttctgacacaaaggaccatcttcctagtgccataatttatcttagaccccaaaactcacagaggcacacatcatatctctaatacttgctcaccaccactggcatgagtctctctctatcctcttctacgtgaagtgattatactgtcacctctggagctaactgtccacagtctcaagatgcacacttttacaaccagaagcctatggactgggtgagggagcagaaacagccacaggtactgcccatcagggtaatgtaagtcagcgtgcaaacaactgatcagatgaacatgaatagcaaggtgccgaggcactgggaagagggaccggaaaactctataactgttgaaaaagactcaagcccttgggaagggaaatgcctacgaaattatataaagaccattttatccaagttggtcatcattcagatgaaaaccatgaggcccagaaaagtaaactgagtttccagaattcacacaattgatagaataggaaccagaattcaggcctcttgcttcctattccagaaagacaaattgcaataataatcaaataatatgagcaatcatccagtaaaaataatctagtaaaaacagcaaaactcaaaagagtgatttttcctggttaagaccaaactaaccatagattgctatacatagtatctattataaatactgaattatatagcagcctgacaataaatacataaaatgtgtacacaaagattattgaacctgtacaatacagtagtaaatagtaactttatatttgcaaagtgactgatcattactatcagaatttgtacccattcttcatattttgttggtcatataaccagttactacaactgcaaaaacaacctaaggtcatgtttctgtgaagtccatccttttggtctttaaattttattattctcaaaggtcaattatgatctcaatcttttcttgtaattttactgacaattctccttcacactgatttgttctttctctaattcctgtaaatagaaagaaccaaaaaaagttgaaaaaacatgtattgtacatataacaaacaatcatatgtggtatacaatatatatcaaatgagtattaagataaacattcaaagagttttaaagaaaaaagtgttatagatattggagggcagaagagacgattgccattaagaacaggtggaggaggttatgccaaggacattgacctgaccctttaggaattagtgaaaattgaataggagaagaatgaggtatacaatgtgtgaaaaatacctaaattgatataacaggaggagaccttttcatatcaattatcattacttctgtgtatataaccatattagatacccacaaacgaatagaaagtggatagttcttgattgacaagtaagactaataatcccagatcatagtaaggtcttaacttcaagtcaataatctttattacttatggttcattcctctccctcatgttttccaataattttaaaatgcataattaaaacaattctcatttaaaaacatagtagccatgactaatgatcttccagtgggaaggtactaagactttacaacatgtttcttgctggggataagacagcctacagccagcattcaactcatttttctaaagtctatggatcaatttgaaatacagaaaaagtagaacagagataaagttaaaaaaagattaaaaatatgggaagaatgggagaaaggggagattagaagatatgaacaatgatttaaaaataaaagagcctcaaaggagaagagaaactgctaagcaagactaaggtaggatgaaatacagtagtctctgtttctgagaacacaggttaaaaagaacataaataaaataaatttatcacctttaatacactcattcaaggatgctactgagtttgactttgggaatttctcacctttaatacactcatctggggatgctacggactgtgacattgggttgcatttaacgggggagagaaagggcagttgcttctattatctgcccttttggactcacagagtttctttgaaaagcacagatgataataaatggaaatattgccttttatactatacaataatatacacatgcaattcactggaaaaagtatacttgttactatgatttgaggatactaccatatactaatcaagagaaacacatgtacagaacaaagaagccacatgaaatttttactagtgtgtgttttccttgtgttctaccaccccaggagcagcttctgctactgaagatcacagtagagttatttccaaaagttgtgggtctgcagggtggacttatcacatagctgtttgccaaaattcaaaagtccagaaaccatttccaaattttcacctcttttatcttcaaatcctaaaactatgaaaattcacaaacttagctccatacattatggtagaaaggttaataatttggactttgagtttgaccaggcctgatttttgaataaattcacaaacttacctccatacattatggtagaaaggtcaataatctggactttgaggtcgaccaggcctgatttttggatccaggctgcaacactcacttgctgtgttaacgtaacaaagttcctagaccatgctgagcttcagtttacttgttattgaattagggatatagcgttcaaaggaagaagttctagtatttgattgcacagcagagaaattatagttattgaactggggatatgtagatagacataataaattttagtattcaattatacaatggagaaatcatagggaacaataatttattatatattctaaaatagctagcagagaaaaattataatgttcccaacacaaagaaaagataaatattcgaggtgatgaatatccaaattactctgatttgatcattacacattgtatacatgtatcaaaaatatcacatgtaccccaaaacatgtacaactatgatacatcaataaaaaacaacaaaaaaaccaaaagaatagaaatcaaaaataaatacataaatacataaaatagggataataatacctcccttgcttgcttgctcccttgctccatttgtaagaaataagtgatataatataggtaaaaatacttaacctcatacctaccacacagtatagcacaataaacgttatttattataatctgaggcctacctacataagtgactttcaagtatagaaaattatttctcaaattttaaatactccctgattctcaggtatggtaattagacctggctttaggtaaagctctcatgtctacacttggatttaatcacttaagtatatttcccagtgccccccccaaaaaaaattgctcctaggtggacacactaatcaaagacttcctgagaaatgcaggaagaagttttgtcctctgaccacgctacaccctttccttgatggtaagccccataatctaaagccataagtttcaattcctcacataaaaagaaaaaaaatgtcttttatgaccacttcagataacactggatatttcccttgtcattaggaatgagaaatgggaggaaggtaaacttgtagacaggagaattggtagatgcttgaaaggatttctgaaaactgtgcctatccaggtgtacaaatgtgttgaccagccaaggcaaagcagtcaaaccatacaataccttatcctcaggaaaatggacttttctcccaaattgcctttttcatgaaaaatataaaattctccagtttcaacctcatgttaaatttcacatgtgaagaaaacagtcatgcacatcagaaaattaaatggcgagtcaagaccaaattcctagtcacagttatgttctgtttccagtattaccttctcacttattcattttgttaaagtggagccaaaatagaagtgggtgtcacacatcaagaaagactgaagtcgtacaaagccgatccttatccaacgtgcattaaaatatgcatcaggcatgtgtgatgcatatagtagaagtggaacaaatcaggccaggtgcagtggctcacgcctgtcagcccagcactttgggaggccaaagcaagcaaatcgcttgagatcagcagttcaagaagtgtaacaaatcctctacaatataagtagagtgaaaagagatagctacagtgatgagggaaggcactatagtgatgtggcatttgagtatagccataaaagaggataaatattacaatacatgaatatagggtctaaagaagtcttttcaagtagattgtaaaatatttcaaaaatggtaagtttggtgtatgttgaagcatacagattgtctacatcctaaaaatcattttggtgaataaaggaaaataagaaaggtagtcaatattcatttgttgcctatcattagaaacttctcaaaggtatatgagaattattaaataaatttaggaagccagtgaaggtatgggtcccgggaattgaggatgaagccagtaattagggaagatgccctatctataagtgtgatgtatcaaatggaggaaaagaaaaacggagggaaggagttcccttaagagaagattgaaatagagcagacttggggggctacacagaggaactggg[367 bp omitted]ctggtaagtaaaaacccaaaggattggtgacttatcacagctggagtgaatacgaaggagcatgaactcaaagaaaatatcaagatttaagcaagaataaataggacaatggtaggtccatttttagaaattagaaagttgaacataaaatatgtcagggtggagaaaataatcacgtgtattttaagcaaataagagtattagatattgagatgctcaggtgaaaacatatgacaggatatatgggggaaaagtacaaattcaacatgtaattgtatagtaatccatataaaaataatagacggatgtgtaagagtgcataaggtccctgaaggaaataatacacaggaaaaaaagattaaaaagcaaagacccaactatagaaactatccacattgattatgtaaagtaggaaaaggaatcaataaactagacagaacatcacagaggtaggaggacaagtgctggcctcaaggagccaacacagaagcaggtatcaagaataaaggaggagaagagagaacaaagagagagagaagagaacttctgtggcagaagatcaagtgggatggtagaataaaggagaagaaatacaagaaaattgaaataaaatttacagaaatgttctacattgtaagtgggcagttttgacctggcacattgttggcacacattataaatgtcaaatgtattaatgaatgaatgaatggataatataatgaatgtgatggagttgtcaaaagctgaattaattaaaagtccccacgagaggttagatgacaaaattttcagaaactttccatgccactctgttgtgacatcaacagtgctggacccttgaaatcaaaccaaaaggattccaccatgagaatgaaaagggctgagaaggggaatgctgggtgacacagaaggtgacaaagggcgaaaggtttctaggcatttgatagactgatggacgtccgcgctgaccataaggcacaggccacacaggaaggaaaatgagacccaacgcgaagaaaagtagggctaaacagtcgggaaaatgtgggaagaaggatgaatagtcatacgatcaactcagattcctccctgacattcttctacagctttattctcgtcctttgggagccgagatgttcattttcctacattcttagctgcctacacacggcgacttttctccacggtgcctgatccctgctgcatcctccttctctagtggcaacagcaaatggccacacagaaggcagacattgcacccaactgaggagaatgtaattcactcattgccagtcacagaccttggctcaccgatttactaagtatagattttatttctatccctcacctacctgttttgccaagggaactaagaaaagagcatcatcaaaaattcagataggtatagttctcacaagatgaaccagatccagtacggcatcactgcagacatacacacagagctgcataaaacaggaagagagctgctaatcacagccccagagggtagtggccaaagtgatgccttggagatccgagaatgccagactgagatcacacggcctggggaattaccgcctatggtcattttggttttcccgggatagccatgttaattgggtgaaataaagcatatttgattttcttatgacaaaaaagggcttttgccattgtctacagatgatactttaaatctttattttatgactaaaggtgaattccagagcaacattaaatgttgtccctttaaatttttaatcatttgcataacgattaccataatattcaatttaaacataaaatgtaattgaaagtatgagattaatatgtggacatgaaatcatataatgttccatggaaaaaatagaatgtataaggcaaagaggtttaaagtaacatcaaaactaacgctcactatacaaattctatgaaatcctcataattacactgtgaagcaggtgttgttagagccacataatctcaaacaaattatttattatctaaaattacatagatattaaaaggttaggccatatatgaatttaggattctctcaaaaattttttctctttctcctacatcaaacttccctaaattatagaaaagtcacaatgttaccaaacatattcacaaaacacatataatcttgaatccaaatttcagttacagcagaaaaaataaaactctagatcaatctcaatcgtgtaaataaattcagatttccaatctaagagtctcaatttgacatacttctttctctctcttctttcaaaccaggagaaatataaatatgagccacaaccttacaaaagctagaaaatatttacaattccacacaacaacacatgaagaaaaccttctggacatcaaaagtttaaaccagtcaagactgaacaccaagataaagtgcatgcctctgaagagcttgagctagtcaagaagcccagaaatccctaaaagaggtgtgtatactgaggactgaggatcaaaacctgtgatctttacttggaacagaaatattgcagcatgtgaaccctccacagagtgacagagggaaaggagtttaaagggaaacatgcaaatgtatcacctttggaataattaggacacgtgtgtggtgtaatgaaagaaggcaaaaagatggggaagaagccagacagatggcaattttcattctattatgaaaagaaaaggataagtcacaagtcacatgacgaaattaacaactatgaatccactctaagccatagtcaatcctatagcctaggagtcattctaacagatgagagtgttttggagacaagattccaaaactcgtctgccttccatcatacttactacccccagctcctcctccacaatatcctttcacaagtatctagaatattcaaagactaataatattatataattatttataataattgtattacaaaaataaaacttgatgacctttataaaaatactagaagaaaaagggaaaattacataaggtacagaacatacaaattataccatgaagcagtaaaaaacaggatcaaattttctatgttttttaaaaatatgccttctctaaaatgttttctctctgaaatgatatttagaagacataattgaaaataaatacaaaataaagtgataaaaaataatctggcaaaattcaggatgtaatgagtaaagacaaccatgaaagaaatgaagatcaataaaagcaggaaaaaaagtgggaagtggagagaataatgctgctaaaaacacagataagaatataaatgacaggcttaaatatatcctgagcaaaacgaaatagaaaacacaagaaggtgaaatgtaacattaaagtcaggtccaacaaatgagaaattagtgtgaaagagctcacaatatctggttaaaaaattcaaagataaaagaaaacttttctgaaatgaagaaaacattgaatctaatggttaaagggcttatctttatccagaaaaaatgtgttatagtatgaccacatcaaggcagatgcaactgaatttaccggacttcacaaacacaaaataaacaacccacaaaaaaaaaaaaaaaaaatagagtccccatgaggctttaatgaagacaactattagaggccaggcgcaggggctaacacctacagtcccaacactttgaaaggccaaggcaggagaatcacttgagcccaggagttcaagataagaccagcctgggcaacatagcaagaccccatctctatcagaaaaacttaaaaaagaaaactatccactaaaaatgaatagagataacatgatacaagtgagcattctgaagcctaatatcaaaatgttctggggtttgcggttaaagaacagaatgcaaatgttacaaaccataactgtataaagactaattatattcataacaaaaataagaagagaaagatagtagaaatatattctggtccattcaactttcacagtgggagagaatcaacaaattatgttatgggtgattaaatattattttaaaagataaaggtcattattagaaaaattaaaaataacaaaatcaaataaagttgaatgacgaaggtgggagaggaaagtgggtttaaggggtaaagtggaactatattaaaagagtcaatggagagcacccttggaaataacacaaaaattaaagaactaaatataatttatacagcacataactaaactataaatcttcaaattaaaagaaaataggtacatacaaaatatcacatagagagatattaataccatgaaaatattaaaataaaagcataaaattaattcatttatttaccctattagtattttttgaacacctatgtgccaggtattgtgctgaatgccagtaagatatagttcctgcatcttggagttttcgtggaggagacagagattaatcaaacaatcacacaaatgtaaaattgcaaccataaaaattactctgaaatacaatgaaaattactataagagagggatttgatgtgagtcagagaagtttcccctaagaaagcaacactgaagctgagatctaaagggtaaacagcagttaactgagtggagaacaaaggttttcctgcagggggaacaatctgctccccgaggccagagtggggccttgggagttgtgcctgaaaccacattgtgaggaagtgaggggaagcattgtgcagataatgctgaaataagtagtggaagatgcttcctaagagaatgagaaatccaagactactaagcagaagaatgatttgaccagatttcacatttgtaaatatcactatggttacaatgtatagaatggattttaaggaattcaaattggatacaggtgagtcaattacaaagcaacatgcttgccaaggcaagaaatttgattacttaaactagatatgggagttttggaaataagtagataaatttgtcatatatttgagataataaatcaccatgacttgatggtagacttagttggagatgccctcactagtgcaccatctaatgcttcaagtctaataattattcaattcctccagagccaccaatccaatggttctaccatatttatgctgtcattcactttactgatatccttcttaccttacctcttttcccactttatattccatgatcaataccttgctccctcgtaatgattgtactcactcttccaaacaacaatcctgataaatcctactctctgccttctacatcttgataccacacagctatatgtggctagataaaacaatcacactgacaatcatcctatgctttctgaatccatcactcttctactttttcagatcttttctttctccctcatccttaccatgtaatgaactcattttgcatgtcaagggctaaaagttgaatattttaaaagttctcattttcccactactatataaaccaacaaatatctttagtctgcattcacaaataacataacaaatgagctcttcatatttctatctgtggtgaattaagatgactagaaattttgtggcaccatcctgttgaaaacgtggggacatattctttctccttgaacctgggtgggctctttgactgctttgaccaataaaatacagtgaaagtaaaacttccagttttgatgtccagatgttaaaagccttgaagcttccatttctacatcttggaaccaacgtgtgtggggtgctgagtcggtatcgaagaattctgcttattctgcttgcattagtccattttcatgctgctgataaagacatatccaagaccgggtaatttatgaataaaaagagtttcatggaatcacagttccatgtggatggggaggcctcacaatcatggcagaaggtgaaaagtatgcattacatgggagcagacaagagacaatgagagctgagtgaaaggggaagccccttgtaaagtcatcagctctcatgagacttattcacgaccataagaacagtatgggggagccaccccatcattcaattatctctcaccaggtccctccacaacacatgggaattatgggagctacaattcaagatgagatttgggaaaggacacagccaaaccacctcattctgcctctggcacctcccaaatctcatgtcctcacatttcaaaaccaatcatgccttcccaatagtccccaaaagtcttaactcacttcagcattaactcaaaagttggcagtccaaagtctcacctgagacagggcaagtctcttccacatataaacctgtaaaatcaaaagcaatttagttattttctagataagataggagtacaggcattgggtaaatgcagccgttccaaatggtaaaatttacccaaaacaaagggactaaaggctccaagcaagtccgaaatccagtgggacagtcaaatcttaaagctccaaaatgatctcctttgactctatgtctcacatccaggtcatactcatgcaagtggtgggttcccatggtctcaggcagctccacccctgtggttttgcaggggagagccttcctcccggttgctttcacaggctggcattgtatgcagcttttccaggcacacagtgcaagctgtcagtggatctaccattccggggtctggaggacagcagccctcttctcatagctccactaggcagtaccctagtggggactctgtgttgggggcttcaaccccacatttccattccccactgccttagcagaggttctccatgaagacctcacccctgcagcaaacttctgtctggagatccaggcatttccatacattctctgaaatctaggtggaggttcccatacctcgattctggacttccgtgaatccacaggctcaacaccacatggaagctgccaaagcttgaggcttgcaccctctgaagccatggcctgagctgtaccttgaccccttttagctgtggctggagcagctgggacacagagcaccaagtccctaggctgtacacaggcaaacagcagaggggccctgggcccagcctatgaaaccattttttcctcctaggcctctgggtgtgtgatggaaggggctgccacaaagatctctgacatggcctgaagacttagcgattaacatttggctccttgttacttatgcaaatttctgcagccagcttgaatttctcctcagaaaatggatttttcttttctatcacagtgtcatgctacaaattttctgaacgtttatgctctgttttcctgttaaaactgagtgcttttaacacacccaagtcactcttgaatgctttgctgcttagaaatttcttctgccagataccctaactcatctccctcaagttcaaagttccacaaatctctagggcagggacaaaatgctgccagtctctctcgatagcaagagacacctttactgcagttcccagtgagttcctcatctccatctgagaccatctcagcctggatttcattgtctatatcattatttgacattttagtcaaagccattcaacaagtctctaggaagttccaaactttcccacattttcctgtcgttttctgagccctccaaactgtttcaacccctgcctgttacccagttccaaagtcgcttccacatttttgggttatctttacaacagcaccccactctaccagtaccaatgtactgtattagtctgttttcatgctgctgataaagacatacctgagactgagtgatttatgaagaaaaagacacttaatggactcacatttccaggtggatggggaggcctcacaatcatggtggaaggcaaaaggcacatctctacatgatggcagacaagacagaatgagagctgagtgaaaggggaacccccttacaaaatcatcagctcttgtgagacttattcaagaccacgagaacagtatgggggaaatactcctgtgattcagttatctcccgttggatccctcccacaagacacggaaattatgggagctacaattcaagatgagatttgggtggggacacagccaaaccatattgctgctgaatagatcatgtagacaggctctcaaactacacggagagcaagagaggcccaccttaccacaacatttcatccaatccactaataaaacaggcacatcactgaaaccaccttcaactctccagactacccagctgccagctgaataccacagatggctacagttaataccacatggagcagaatcatgtagctaagccctgcttgcactaatacaagtccacaattttttttaagtttgttgttttaagctgcgaagttttgaggtggtttgtggtacgtggaataagatgtcactctaatataatataaacttaaactatgtggcattggctttggaatcagacaatggatagaagccagaaggatttcacaaagactgttagtgaaaagtgaacagacttcaaggaaaatgatagcaaaacctgtaaaagcattctgggaactgacagtaaacactgaatggtccttaaggagactgaaaacttgaaagagcttaagaagtctactggaaagggctttaaggataatgagaaaaaatcatcagtggaggctgaggaaaacgcaccaaagtcgtattctgatgggagagttagaaaacgcttgcctggaatgatataaaatataggaaaaataccgaaaaagtttgtggatctggctggggagatttttggtgtcaactaaagaaaaaaattaagcttttaagaaattaaagttagatttatttaggggtctgagaacaagagactgaggattacagcctaggagaagtctttcagagaggttctgtcagactgctctggtgaaggtctttagcccacagtttatatgcaggctgtacatatacaccatggaatactatgccgccattaaaaaatgatatcatgtcttttgctggaatgtggatggaccttctattatacttagcaaactaatgcaggaacagaaaaccaaatacagcatactctcagttataagtgggagctaaatgatgagaactaatgaacacaaagaataaaacagaccctggggtctacttgagggtggagggtgagaaaaggaagagaagcagaaaagataactattgggtactaggtttaatacctgggtgatgaaataatctgtacaataaccccctgtgacaccagtttacctatgtaacaaatgcccctaaacttaaaataaaagttaaaaaaaaagaaaattaaaatctccttatcatctacctggtaatatgaaaaacacaaatctttcattcattcctttcaactgatgaggaaaatgaggcatcgggagttagtaaaagtccacattgagatatgagacccacgactggctggacgcagtggctcacacctgtaatcccagcactttgggaggccgatgctggtggaacacctaaggtcaggagttcgggaccaggctggccaacatggtgaaacccccatctctactaaaaatacaaaaattagctgggtgtggtggcaggcacctgtaataccagctactagggaggctgaggcaggagaatcgcttgaacccaggaggtggagtttacagtgagccaaaatcacgccattgcactccagcctgggcaacaagagcaagactctgtcggggaaaaaaaaaaaaaaaaaaaccaccaccatcattttgcaagtgttaccactattgtgtgttaatattgtagaagtattcctaattatgatttctttgtattcctaattgtaatagctttgtatttgaaaaattattgattcatactctatgttattattttgtatgtgatgacaacagaatatattatcatgctccttttgtgaatctcattcataatataaagtataaatttgtgattttgctttaatttgaaatattaatttcaaatatgttatcacaatttgatacaaactattgacagtaaatctgtggattaagtaatgtcttagtaggtattgggaaaatttgaaactagtaacatggaggactattgtcattgtttatttcaaagccagttaaaattctgcaaagcagtgtacataaaaataatttcaagaaatttataaaataccgagattatggtgtataaacaactttagattctttgtttaagaaattctgccagtttgtaatatatgcttcattcaaagtagctaagggctgtacctggccaatagtaggcacctaatatttgttgaaaaggaatactgagtagctgggacctcctgagtagctgggaccacacacatttaacctgtatttataaaattactgtttagagaataacatttgatggaatcatgcttttactttctgcttatgactcaattgtttgtactgacattaacatcccaaatccttagcatggcctacaaggccctgagcaatgtggcacctgctgaagcctgctgcctcatttaataactctttgtctctttcccagatccagccactctaacattttttagctcctggaccaagacaagctcttcccagaacctgacctttgtacctgttctttattcctggagtatttttcccctgacaaattacttatcatctatcataattcaggttaaatggcactaactcagggaaggcttccctaactgcctcccttctccaaccaaattaggaacaattatatggccacatagtatcgaatcaagtttataattttaaaataattgggagattttgttgtttaacacttgttttcactataagactgtaattacatgcaagtaagaaccatgcctgtttgttcactcctgccacagtcagaatagtgcctggaatatgcagtaagggctgaacaaacactaaataaatgaacaagtgaataaatggatattgtctcatttttagaacagagtactgaagggatcatgaacactatctggtatgtcacgtaggtaatttacaagggctacaatttcagctcagatttaccttttcctggatacaggtcttgataggtctcttgatgtcatttcacttcagattcttctttagaaaacttggacaatagcatttgctgtcttgtccaaattgttactaagaatcaagagagatatctgacatgaaatgacattggaaaacattaaacacgattgaaataatgctagccaatatggttattattagaaaccaattacattttcaacttaaaaacagtaatacttattgcagactcaaatgtgcttattctaaaacaagtaaatgtttgcctatggtctgagattctaatccacggagttcattctaatccacattcaacactatcatgtaccagtgggcctcataacccacctagccctgtgatttttcaggttcacttttctaaacttgtgaattaaatatttattttcttagttcagaagaggaaaaaaactcttgtaattgttgcccatttcaggagaaatcttgcatatgaaaacaagagataaatatacacaactgaggactgtggtttaaacaaaatcttgagaatgttttttgaccttatacatttgtgctttagtataacaaaatgatatagacaaaggtaacttttaatagaaccagtcactaaattaaaaaaatgacaaattcttctgcttagctaagcaacagagaaggtaaaatactaattcaattcatcaatttaagcaatactcattaagagccaagtatgtgcttactgaataagctgctaaggtttggtggttacagagtgtgcggtgaaatgatgtctacatcacagtccaacattcacagagtttaaaagcctaccaagaatcaagacagacacaaatacctaacatagaagtttgtatatgataagagagccagagtacaatttaggagaagaaattgtatggaaggaaggttcatttccattagaccagaaaagacagcacatttgaaggcctgaataagaaatattctggataagatattgtggctgctaccagaatggctcttgatgatctctacctcttggtatttatacccttatataatctctttcctatagtgtaagctggtcccaggtacttgtttctattgaatagaatagaacaaaagaaatgagatgccacttctgagattagattataagatactgtgaatttcatcttgtgccctctccctctctctctttctcttgccctctcatttgaatgaagccaaccggcatgctgtcagtggcccagtgtaagtcctgttacaagaaattgatgattacctgtagccaaccctaagtgaagaactgaggtcctcagtcctacaaatggagagaaactgaatctagctaagaaccatgtgagtgagctgggaagaagatccaccctcagttgaaatttaagatgacatattgagcagacatactgagacacactgaaagtaagagagcaggaggaaacaaaaccagggtcatacaaagaacacaactgattttgagattctcacataagtattacaccttcagtgagcacgtgtactagaaatttaaaaaataaataaaataaaccttcaaagtgagctagcaaataaatttccctatggtctcagctctgagtggagagagaaaatgttccctgtggagtttatagccagaatccagctctcaaacaggtttcagcctgaactcacacaatctgtgtggcttccaaatttgcaagctgagaatttaattcaaagtggtctcaggttgatagcagtccaaaatgctaggtaggaaaaaaaatcctctctggacaaataaatcatcaaagcaagctcataagagcaggtttcaaaggtcatgagcttctaacacacacacaaaaatcacacacacaaaatgggggtagcagcaacatgggtagcgtattcaaacttgaaaagactttaaatatttgtattattagatgtagattatgaaacacatattttaatgtggttaatttttttaaggaatcaaaactatgagtaaagaccaagaaaattgtgctggatggccacttccaccatggctcccctcctatttaagtctgggtactgtgtcacccgaagtcttcaggcacattgttccaggtttgggtttgcctatgaaagaaactcatgagagctggaagtgaggagtgaagaggaggtcttcacataaagcaggcttaaggattagacatagcaggtttgacagatgtgatggcttgcagaatcctttatgagctcccactgtccatctggataagatttacagacctttcagaaattcctataagcttgggttctgtgcccactctctagactgtcaggctaagatctctgatataaaacagacctcttctgattttgtctagctgcttttctaatatctattcaccaagctcttccaataatagcataaggccctaattaatattaaacttttatcattataatacataggatgtcttctgttttcctgatcaaattctgactactattaaaatataaagaattgtccagaaatatataaaaaaagaatcacacattgatcttctttaaatgaaaatataacaattgtatggactaggatgattacagttgttcagttctgactgttatttgaagaaaaaagcaataagaagcctcagcaacttaacagaaggagctgccatttactaggagaaaagattgtggatgagagtgtagcaaaggtcagaattctgtgaagcttgagatgtttattataatgaattatcttttatactcactacaatttcctaacaattttggggtttatatttttgaaagagatatacctttaattttctttctttgtactattgttaggtaactttaatgtgcagattatactacagtgaaagttgccaatgacaaggcaaagtcacttacatcagacccaaagcaaagtggagccgggtcatgaaaaaggggatcttgtgtgtgtgtccacgataagcactatcacaaggactttctataaactcacaagaaatttctgcccacccagcacactctgtttgtccagctcatcctgtaggtgtctctataataggacctatcataaaaaattcctcaagactgcagcatttcagataagccaccctcacaagaacacttgcctagcaatggctgtttctgccagtaagttaacaccagctcctgcatcagaccctgtgaccaatgatgtttgtttcaaaacagcttgcatggacttctttttgtctttatatattttccttacctcaacctcttgggatgcacctatgattgatcatagcacaaatatctcagattataatccttgtttatttccaaataaatttatttctttggagatccactttttctgttattatacattgacattgttattatgaaattggttgggtgatgtgtcttattttcttgtctccagaagaatttctgtaacagtgcaattaaacgttctttgcatgtttgctagaactcacctgtaaaattgtctgagcaaccaaagcctggtttttgtgtttagtttttcttttgtgattggggaggggggtttatcgtactgattcaaggtgtgaaggtaacatcattttgattttatacatcttcttcagtccatttaagcatgttacatagcgttgtttgttcttttcatgatattctttacagtagtctcctaaatgttccctctgcttctgccaggagcccctacaatcaactcagaagctatagagtttaaaacatgtaacatattatgccacctttcttaccgtaaaacatcccatggtttctcatagtatttatagtaaaagtgaaatttttatgatggcttgagaaacttttcccattagatgcccaagtgctggtctggtctgatcttctcatcttcccttgggtgattctgtggcagtcacactagcctccttgctgctccacaaaaactccagcatgatcctacttcaggatatttgccattgttactgcatctgcctggaaccttttctcccatataaacatagagattgctcttgcctgtccttcaagtctattcttaaatgtcccattctctgtgaagctttcctgcccaccctatttaaattacagacttcactcccaattccccatctactttaagagtcttcatttatcattccttgacaaactgtaaatatacatgttcacttttttatcgtctgtctccaaatactggaatgttaagttctgtaatgtcagatatttctgtttggttcactggtgtattcttaaagcatgttacatactaggtatactcaatgaatatttgttgaataaatatcacattgggcttattccagaaattcaagcttgtttcaatagttagagcaatctacaaatgtaattcattacattaactaattaaaggagctaaatcacatcaccaccacaataatgcagaaaaccacatttgatacaactcaatattcatgtctgcctaacaaacatctcatgatactaggaaaagaggaagggatatattattttcatgtataaagcactaaccattgtagcatgccaatatactcaaaattcaatgaaattcctatcaaaattttagcattcctcttagtcctcaacaaagcatttctaaaatgtgtatagaagaccaaagggccaaaagagtcaacttctgaagaagcgcaaaaagaaagttgaggaaatcttaaaacatgttattgagcttaaagttgcaaaaataaactcatgtaccataattgatgagtagaaaaatagactagtggaataacataaaaataaaaacaatgcttacataaaatgttgtaactgatttggatgtcattagaaatcagtaagtaaatagatggacaatgtaatgaaagatgctaggcaaataatgtggtagggagaataatggccctcaaagatgcccatgcctaaccctggaacctgtgaatatgttacactgaatgcaataaaggcttatcagatgtgattaaggatgcaaaccgagatggagagatcttcctgggttacccagatgggcccagtctaatcacatgagttcttaaaaatggagaacctttcttagctgagtccagagagagatgtgacaatgaaagaatggtcagagaaatgtgacattgccagctttaaaaagagagaggagaggcaatgagaaaaggaatgctgatgttctctagaagatagaaaaggccaggatatggattctaccctagccgccataaagaaacatgcctgtcgacaacttgattttagttcactaaaattcatgcctgatttctgacttgtgtacactgtaagatgacaagtttgtgttattttaggtcacttagtttgtagaaatttgttacagcagtaatagaacaagtggttatccatatgaggcaaattagattggatacctatctccaatagaaatcaattcaaggtgaattccaggaaaatacttaaaacatttagattaaaaataaatgagaatttttgttactttttgtaggtcatagaaccaagaaaaacaaacattaaggaggaaaaatgaacatatgactacatcaaaatataaagcttctctatttggatgatatcataaggtgacaaatcataaactgtaatatttacaacatatatataagtgaataaatatacatttagaatatatatgaactcccaaaaatcaacaggaaaaataagacatagaacaagcaaaatgcataaacaaaagaaggcaaaacaaaaataatgactcataattatatgaaaagaagctcatcttcatagatgagcagataaatgcaaattaaaaccaccctgagatgctttttacatccatgagcctgataaaagttagagtctaaaagtaataattaacaaagatgggaagtaacagaaaatcttgtccattactggttaaagtataaactgatacagctactttatagaatattacattatagaataaagttgtgagtatgtatatgcagtgactcagcatattcattgctagtatgtactcaagagaaacttacaggagtggactaggaagtaaatacaaaatgattacaacattgtttgttatatcaaaaaataaaaaagacacccaattttccagcaaaaaaaataagtaaaaataaatcctggtgtattctaacaatggaataatatatagccattaaaataaatcaactattactgtacatatgaatgtaagtatcagcaaaacatattgtttagtgaaaaactaagaagctgaagaagaatatatacaatatggttacatttatatgaagtccaaaaacttgcaaaataaagaaatgtatttagaaatagattcacatgtgagaaaactagaagaaaattaatgaaaggataagagggatagcagtaattctgagtagttgagggaatttcaattggaaaaaaataatatcatattctttaagtcaggtagtgggtattagcatttgttttaccatcgttctttattcttatagctacactatatattttcaatgtatttaatgtattttttgcataattaaatattatgcaataaaaatgagaaaacaaaaaagtagaaaatgataaattacaataaagaaatggagaaaaaattataatctagttgagtaatggtatattacatagctattttcttaagtagatgtatgtacatgatgtatgcacgattgtacatacatgttcttaattatatataaatatatatgtacatatttttaatataaaatactaaacaaagtacaccaaaatattagctcctatgttagtgagataatgttttgtttttttgtattttaagttttacatagtaggtgtatttttctgttttcatactgctataaagaactgcccaagactgggtaatttataaaggaaagaagtttaattggctcacagttcagcacagcttgggaggcctcaggaaatctacaatcatggcggaagacaaagaggaagcaagccagcttcttcgcaaggcagcatgaagaagtgccgagcaaaggggaaagaatcccttataaaaccatcaaatctcgtgagaactcactatcgcaagaacagcacaggggaaactgcccccatgattcaattacctccacctggtctctcccttgacctgtggggattatgggggctatggggattacaattcaagacgagattcaggtggggatacaaagcctaaccatatcagtaggcatgtattgaattttaaactcagagaaaaatactagtgtttttataggattcttactaaagaaaaaccagaaagtaataaaccatctacgctaagacataaaattcagttgtttagttacaagatagaatgtggccttgtaagaaagcaaattaacttctaacatacaaagccttagagaagattcaagtgactgacggatcttaaacagagctattattacaactcgaactgcagtaaaatatcctcagcaacatagatgtgtgtgtttcactagtcagagcaatacaaatttaatgaaactccattggtggtgtttttaatcagacaatttctgaagatgtcctggcttattcacagatgcaagccaaatctctagaagagtaccataataagaaaaaaaagaatacaggcaattgagagctgttccaaagtttagggagtttttgtaaggaattaataaataaaaatgttcttgaaagagagaaattaatatgcagttcatactgccagaattgcaggcaatttatcaaagtcccctaatcctccaaaatcgctattttttttttgacacacactttacagtacagaagaaaatgtctccggcaataaatcacaaagttaaaattacctagtctacaattaactacacagtgatggtaaatcattttctaccaaaagaaagaaatgtcttgtctattcaggttctgctctacttaaaagttttccttgttggcgagcaagtggttagaaaatcatattttatacgtacattcagcttaactatcattcagctcaggaagatgactcagggccttatccataccttgaagtttgctcttagcaagtaattgtttcagtatctatatcaaaaatggcttaagcctgcaacatgtttctgaatgattaacaaggtgatagtcagttcttcattgaatcctggatgttttatttttcttaataagaggaattcatatggatcagctagaaaaaaattaagaggaaaatcacatggaaagttatatattatatatctattatatataatattatatatctattatatattatatattgtatatctattacatatataatattatatatgtattatatatattatatattatatatctattatatatattatatattatatatctattatatataatattatatattatatatctattataaatattatatattatatatctattatatataatattatatattatatatctattatatataatattatatattatatatctattatatataatattatatattatatatctattatatataatattatatattatatatctattatatataatattatatattatatatctattatatataatattatatattatatatctattatatataatattatatattatatatctattatatataatattatatattatatatctattatatataatattatatattatatatcatttccaaattccccagcgttcatatttgtcagtgcaagtaaagagccttactgctgatgaggtttgaggtatgaccatttggccagaatttatgaactctacatgtcgcttgatgtgtgcttcagggtacactttttttttttttttgagacggagtcttgctctgtcgcccaggctggagtgcagcggtgcgatctcagctcaccgcaagctccgtctcccgggttcacgccattctcctgcctgagcctcctgagtagctgggactacaggcgcccgccactatgccctgctaattttt[147 bp omitted]gacactactttgaaggtcataaaaaatataataagagataaggctaatttcctttaataataataaaatcctttaataaaaatataaaggaataatataataattttctttaataaaatataataagagataaggctaatttcctttaataaaatatagtaactacataccaacagaattccaaaaaaagaaatggagaggaagggagcatgggtcattaatcttgtcaaaaatataaaattatatacgaggaattcctagaaactgttttccttgtctgcggccattgtgctgctgctacacaactaccgcaagcagcccttcacgccctcctcccagtacaaagctaattgacttgtgagaaatgttaagcttggaagagtcagcatcgctgcacttattttttattctactctgacattagaataatccttgagtgggggaaaggttaaaaacccccctggataagtgttactaattaatgatgattgttttaaacaatgtttggataatttttccttgtcccttgacataaacttgataaataactgagaagtgagaaggagattagtgggttgattaaattccattcaggtacttaaagttagctccaaaaatttagctatttgtaaattgtcatgcattgttaatgtataagagatgtagatttcatttatctttggtggagcgagatgaagcagtgaatcattgaagactgaaagaaagaaaaaggtcttttcccttttctttaagaagcatcattagttaaaaacatgttagttgataccagagaactatatttaaagggacagcaataagcaaattgattactctggtgattattggagtgacattgccttttagttgtactttcacaaaaattcacaatatttgccaaagtcaagttatccattacactattaatttgtcattcttttgtttatatagtcaatatctctatctcaattggatctatctcaactgcttctaaacaagccaccatagtctctcccatttcaacaatctcttccaagtaccacttcatttcttcttttcatatttttgaaaacttttgaaaaactacctattttcctcctccatttcttgttcattccattctagtggacatggaatctgttcctcctccaaaacggaatttggtcacccttaaattactaaacccaaaacaatatgttgtctttatctttacctctctgtggcatttaatgataagaccactactttcttctcttttacccttctttcttgaattcagtcaaacaacgtacttacattttttgtcttattctccatcttagaaaccacctcagctttctccattcagctataaaattgtgcttttcctcaaagattaatctgcctctcctctcactctatactatctctgttagctaattttatttgtgcacattgcttatactgggcattatatacacatatgcatgtgtgtacatgtgcacacacacactgtatgtggacatgtatatatatatgtgtgtgtgtgtatatatagtatatatataaattacaataacataaaggtggcattttaaattagtggaaattaccctgatttgatcactacacattctatacatgtaaagaaaatatcactctgtatcccaagaatatgtacaattatggtttgtcaaatgaaaaagttcatacattgaaaaattttagataaatatcaaactttctctgaaactgtaactgtaaaatgtaaaaaacagtaagtgctatattgcttatttctgagtagaagaatatgagacatttccctaatcattatgtgtaattacaattacatatatatatgtaattgtaattacacataatgattagggaaatgtctcatattctatatatatagacagaaagagagaaaatatatgagggagagaaggaatctttccatctcctttgagttccacggtgttgagagtcaggacaactgcaattgcttcatcatgcctgcttgcaattatagggcttttgaaccatttgttccctccttagatatcctcatttttttcagattcttgcttagaagtcactcctccgtggacctcctctgacatattaaacattgcagtccattataagctgcaagaggacagggatttttgcctgttttattccctactgtatcaccaggggctacagcaatatctgacaaacagtgggcatgtaatgaatatttgttaagtgaagtaataaattcaatcaaatcacaccacctgtttaaagcacttcattggcttcacattgcacttagaataaagagaaattctttttatacaatataagttcctgcagaatgcagacactttctacttctccagcctcttttcgactcctctcctactagcttctgtatttaagccacattagacctttcttcagttttttatatagactttgtcgcatcacacctcagagattctgtacatgttcttcctcctgcctagaaaggatcgtccctccactttcgccaactaatccctgctcaacttttcatctcagcaggaggcccattctctttggcaatcctctggcctccagcccatttattatatgctcacatgtcaacatgtacttcgtacagcatgtaacacaattgcacttttatattttaacaaattatatttcccatattgaactgtaagtctcctgaaagcaggaattttgttcttgctcatcatcaactttttcaacatccagtgcaccatttagaacttagatgtagtcaatagaggtttgtggaatgaaagaggaaaagaaagaattaatattcctttaaattaggatggcaaagatcatatatagaaaattggctaagttgtggtccattcatgtttgctcccaattaaggagcacagctatgaaaaggaaggcttcaaattaataaccaatagatttttttaaaaagaaaactggccaggtactgtggcttatgtctgtaatatcagcatgttgggaggccaaggcaggattacttgagcccagaaattccagaccagcctgagaatttggcaaaactctgtctctacaaaaattacaaaaattagccaagtttggtggcatgtgcctgtagtaccagctacttgggaggctgaggtggaagaatagcttgagtctgggaggtcaaggctgcaatgagctgtgattgcaccactgcactcaagcctgggtggtagagtaagaccctgtctcaaaaaaaaaaaaaaaaaagaaaaatcactaagcaaaataagacatgtgaaggatcatgtcaaaggtaagaaaaattaggggaacattaaaagctttcttcccaagccactaaatcaacttgactaacaaaattaccacttgatttagcattagaaaattacattacatatcaaacataaacccattaatcaaatactaaagaaatttctgagttaaatggtataatgttagcttatgccagagctgaccttgaaagattgttcaaatatggctcagtgtgattgaaagttctgtgtgaatatgtttttggaaagatccaacagcaacaccttagtgtatgtttttgaaataaaatgtatctgagtagcagcaaagttattctcaaatttccattttatagctggagatgttataccgtgacgtatatgataggacccaatatggatcaatcccttttagaagtcaatcaggaagaggggagcagttaaaacagttgcttggtttacaaacattagaacaattttcttattcacaccatctgattattgtattttattttttccccaacgtttagactacacaatgagttaagaatgataaaaataagctcaccaatatactatgtacatatttaccaaaatctgtgcatgcttatacatataaacacagctgataatttattagttaggctcatttgtaatttttgtcactatagaccagttttttatttaaattgaagattagtatacattttaaatgattagtcaaaataaaaaatctaaaatgtgctctaaatacctcttaggtcagaaaaaaaaagtcaaaagctagagtatagagaaattaagaaacgccctaaatttctaatctgacaaaaattcatacaagatttaaatattttaatggaaaatagaacagaactaattattgaagaaattatagaaaggaaacaaaataaacagattatatggaggatttttagaagataagtaaataaattaatatactaggaaaaaacaagggaaatatacttgataaataaatacaggtaagagttcttttgaaataatgataaaatagaaaatctctgtcaaaactaaaaggaaagatgcataaatatataaataaatgataaaaaatgttgcatacatatatgactttttcagaatcaaaaaatttaaatttctgtaataaaatttaaatgtttataaatttaaaaaactagaagaaagaatgttgactgttcacaatacaaataaatgacaaatatttgaggtgatggatatgctaattatccttatttgatcattgggcattgtatacatgtatcaaaatatcactctgtatcccatgaatatgtacaattatttgtctcaaaaacaaacaaaaaaaagataatgggagaatgttgaaaactcagagagaagagcaactctcacagatagggatccagataacattagcagctgatttctcggcagaaaccttgaaggccagtaggcagtggattatatatttaaaataatgaagaaacctgtcaattgagaaatatatagctggaaaacttatccttcaaaaatgaaggagaaattaagacatttccggatttttttttaaaactgaaaaaaatccatttatccctgaatttgacattcaggaagtgttaagtccttcaggttgaaataaatgaactctaggcaataactatgtaagtaaataagcaagctgtatgaatatacaaagctctctggtaaaggtaaatacataaacaaacataaaaacagtcctattgtaattttggtttgtaactctgctttttattttctacataatttaaaaggcaaatgcataaaatgtaattgtaaatctgttagctggtatacaatgaataaagatataatttgtcacatcaataacataaaaagagtagagctatatatatagcagtagaattttggtatgtgattgaacttaagttgaaataaattcaaattaaaatgttataactctaggatgttatatgtaattctcatagtaaccaaaaatgaaatatatatagaatataaacaaaaggaaatgagactagaaacaaaatgtgtcactacaaaaaaatcaactaaagataaaaaagaaataattgagaaaatgattggcaaaaatcagtaactctgacgtattaaaactttccatgctacataaatctgaaaactctatttcacataaaactggagctgaaagaaacaaatatttacctataaagttaaaagttatatagggaacaaacactaatttttttttagaaaaaattataaaaagagtaaaaatatgccttatactaccgtaatttcatgttttacagctctgggaaaatagaaaataaaatgttctgttagcatgaatccctctgtgcccccaaaaaaccctatggattgcatcattattacctaaaaagtctattctcaaatgcagcagagtgatattttttacaaggtagatattaattttagatatggaataatattggtgatttcaattttataacactgggttaagatgaaagaatgagaagataaaggtccctcagcaatataactcacaaacatgttcagaagcagtaagaagttacattaattatcttttgaaagtcgataatctacatctttaatgtatgcatatagcatagctaatgtactatcgctgggtccatttattcaatgaataattgccgctatgtgtcagacatttttctaggcctaggaatggatacataagtgaacaaagcaaagattctggttcttgtagagtttccattaaaagacaatttagtaaaacttttcttcccccaaattataaaatctgtaagatggtttaacaacatgtgtaaaagtcattgtgggccaggcacggtggctcataccaggtgtggtgactcatagcactctgtcacccaggctggagtgcagtggcacaatctctgctcactgcaacctctgcctcctgggtacaagcgattctcctgcctcagctttctgagtagcaaggactacaggtgcacaccatcacgcctggctaatttttgtactattagtacagacggagtttcaccatgttggccaggctggtctcgaactcctgacctcaaatgatccatctacctcggcctcccaaagtgctggaattacagatgtgagccacaatgcccggccttattttctacaactttggtaactttagcatataccccaaatctgtaagacataatattataattcaaatgcaactcatggcttctcattgtactctttctctagcttttgaattatttattctaataccagttttaattctgacacaaaagcatgggagttctaatcaaaatccaaccttttatcataaaaactatgaagaaattatgagtagaatttaaaaaggaaaataggcctattaattagatttgtctttgtagcatttaactctataataaataatattttatgcctatgagtccccaacaaagcctccagcttctatttagatataaactgtaaaagtcactactggatccacaagcaagactatggtaaataaatttctccacctaaccagcttcttttacatgatgttacatgtttcttttgttttttcattttggcaaatattgattgtcatcttcgtgtttgtctatgtcctaagtgctgggatacagaatctgaaaagatggacacaggacctgccttcaagttcacccccttttttttttttttttgagatgcagttttgctcttgtcacccaggctggagtgtaatggtgagatctctgctcactgcaacctccacctccagggttcaagtgattctcctgcctcagcctcccaagtagctgggattacaggtcccagccaccacgcctagctaatttttgtatttttagtagagacagcgtttcatcatgttggtcaggctggtctcgaactcctaacctcaggtagtcgacccacctcggcctcccacagtgctgagattacaggcatgagccaccacgccctgctaggagttcacgctttagttggggaaaatatacaataagcaagccagtttttaaaatgagaactgcaattagagttaaatgctacaaagacaaactcacaggaagatgggatgtagaatgataaggctctcagaatagtaagagaaactattgcttcttacgatgtttgtctttctttgtatcggtgctcagctgagtctgcagtgcttcagaggcagctttcattttataaaaatctatgatttctccttccagttgttttttctcttcctcgagcttccttatctcctcctgttgaatcattttaagatgctcgaacttgtcctgcagctgtgaaaccaatgtgcagttgtgacaccaaagcagtgtggctgaacacctaaaagaatacgctttttttctgattatcaaacaaacccaaatcatcacagtagagcacgatcttaataacaatctcaaaaactcaggagtaaacactcagatatggaatttttcttttctttcttttttccttttataagatggagtctcactctgttgcccaggctggagtgcactggtgcgatctcagctcactgcaacctccatctcccagttcaagtgattctcctgcctcagcctcttgagtagctgggactataggcatgcatcaccactacaggcgtgtgccaccacacctggctaatttttgtatttttagtagagatggggttttgccatgatggccaggctggtctcgaactcctgacctcaggtgatcctcccgctttggcctcccaaagacttttttttttttttaatatagagacaagttctcagtacgttgcccaggatggtctcaaactcctgagctcaagtgatcctcccacctcagcttcccaaagtgctgggactgactggatgcagtggctcatgcttgtaaactcagcactttgggaggccaaggtgggaggatcgcttgagcccaggagttcaagaccagactgggtgatataacacaatagtcaacttcaacaggagagagaatctgtaaacttgaatatagatcttccgaaattatccagtcagaggacagagaaaaaaagaataaaagagagaaaagaaggctgggtgtggtggctcaagcctgtaatcccaacactttgggaggccgaggcaggcagattaagaggtcaggagttcaagaccagcctgtccaacatgacaaagccccatctctactaaaaatacaaaaattagccgggtgtggtggcacacacctgtagtcccagctacttgggaggctgaggcaggagaatcacttgaacccaggaggcggaggttggagtgcaatgtgagccgagaccacacattacactccagcctgggtgacagagcatgactctgtctcaaaaagaaaaaaaaaagagacagagaaaagaaagccaacaagacaccattaagcaaaccattgtcaggttatgggagtttgagaaggaaagtagagaaaggagaataaagcttatttaaagaatggctgacaactgcctaaatcatgggaaagatttagacatctaaatccatgaagcttaaagattcctaaagaggttcaaaccaaatagatactcaccaagtcacaatataatcaaatagtcaaaagttaaagaaactttgcaggtcaggacagaatcgaataatacattcaaagtgctgaaagaaaaaaactgccagcaactaatactatgtctgacaaagctgtccttcagaaaggaaaaagaaataatgtgtttcctcgacaaacaaagctgagggcattcaggaccactaggtctaccttaaaaaaatgcttaacggagtttttcaagtaaaaatgaatgaagttgggagcggtggctcatgcctgtaatcccattttgggaggctgaggtgggtggatcacctgaggtcgggaggtcaagaccagcctggccaacatggcaaaaccccacctccagtaaaaatacaaaaaattagccaggtatgaaggccactgagatcgtgccactgcactccagcctgggtgacaagagtcaaactacatttcaaaaacaaaaaacaaaacaaacaaaaaaaacaaaacttgaggcctggccttctgctcctctccaacctccccttctctgggcccaagccaccttggctgaggagggggcgaggaggtgtgagcccctgccaggaaccccctgcccggaccaagtgctcggcccccaggcctgcgttcagtgaggcctcccgtggcgtcagcatgttcgtgtggaggaatgtggaaggtcactctgcggccgtgttctcctggtactccatccccttcctgacccctccctgcagccacacgaggcccagcaacctgccagtcactcagtggcctccaaccagagaaaacaacctgccaagttggcagccgttgctcatgagcgtccaccaggtgggacagggagtgttgaccctgggcagccccctggagccacctgccctgaaagcccagggcccgcaaccccacacactttgggggtggtggaacctggtaaaagctcacctcccaccatggaggaggagccctgggcccctcaggggagtccctgctggacagtgagacagagaatgaccatgatgatgctttcctctccatcatgtctcctgacacccagttgcctctaccactcagatgatgtcaggcccagtccctcagtgccctgcgcaaggaacaggactcatcttctgagaaggatggacgcagccccaacaaatcagacaaggaccacatccggtggcccatgagtggcgctcatgatcttcagcaggcggcaccaggccctggcggggcgcaccagggtcatcccaaccaggataaccggaccgtcagccagatgctgagcgagcggtggtacaccctggggcccaatgagatgcagaaatacaacctggccttccaggtgaaggtggcccacttgcaacaaggaccgaaagaagtccagctcagaggccaagcccacaagccaggggctagcaggagtgtaacaagggctcgtgggagcggagcatatcagagacgggcactgccactgcccctggggtgtcctctgaactcctgtcagttgcagcccaaacactccagagctcggataccaaggagcagcttctgtggggcagaacggctgcacacagtcagggaacctggctcagcctggcccaagccttctcccacagcggggtacacagcctggacggcagggaaatagaccgtcaggcactacgggaactgacacaggtggtgtctggcactgcatcatactctggcccaaagccttctactcagcatggagctccaggccactttgcagcccctggtgagggaggtgacccgtgggcagccctgctgccgcccacgtgagctgctcattcccagcacatggccagcgaggtcatagcgagtgacgaagagcacacggtcatccatgaggaggagggggtgatgatgtcattgctgatgatggctttagcaccaccgacaccgatctcaagttcaaggagtgggtgaccgactgagagtggggacaactctggggaggagccagagggcaacaagggctttggtgggaaggtatttgcacctgtcattccttcctcctttactcctgccgccccttgctggatcctgagcccccagggtcccccgatccacctgcagcttttggcagtctatggtcacaccctgtcctcctcctacacatactcggatgcttcctcctcaaccttggcacccacctccttcttactgggcccaggagccttcaaagcccaggagtctggtcaacgcagcagagcgggccccctacggccccaacccctggggatgggggcccagggacgccttccaaggtggcctgtttcctcccaatggatcctgccaccttctggtgcaagagacctgaaagtgtgggcgacctggagctaccaggctcctcagtcatcagggtccctcccaatactaaggctttcctaggcaggagctgggctgagccacccggggggcagagcctgaagagaaactgactgggctttcggggtcggggcagagggaaccccacggacatggatcccacactggaggaccccaccgcgcccaaatgcaagatgagaagatgctccagctgcagtccaaagcccaacacccccaagtgtgccacgtgtgatggggacagcttcccctttgcctgtacaggtggagaagccgaggacaggctcagggaaccggagaccgagaaggcgctgtcctcttcactgcacgtaccctggaccagtgccggccctgatcatgcagctcttccaggcccactgcttcttcctgtccactaggccacagccgccctccaggcccactatgcacacatcttcccctccaaggtttgttctgcccctgccctgactcccagccctgtgggggtcctgaccgcacctcacctggctcagactcttgacgctgccctggctgccccaccactgcttctgcccgagagtcacgtgaggctgagagtaggggcaggggcagcagtggtgccagttggggggcggtccagtgggaggagcctcagcctcgcaggctgctccgtgggactgatgactgcatgatcttctgggcacctcacggatcttcaactgcaggtgaaacggatgctggtggtgggtgcagggccgctgggagctgctgcatggttcccagaggctggactgaggcaggtgccaactgaagctgctggggcagcatgggcaggatgttctgcacacaaaccttggagaagaagatgtgtgcatagcaggtccactgctgctgcccctgccctgactcccagccctgcctgaccccacctcaacctgctcaggctctggcacaaccctggctgccctgccactgcctctgccccagagttggggccttgacagcctggttggaaggggacaccccagccctgcctcaacacctgggggtctccataactagcacaggcaggtgggcaaccccaaagatcccaggactcacagtaccccctgagaacatggacagtatgtgggggtagcaatggagggcaggatggttatcttctcccaggtgaagccatttaatcctttcagtttgggacggagtaaggccttcctctttttttttttttttttttttttttttttgagaccgagtcttgctctgtcgcccaggctggagtgcagtggtgcgatcttggctcactgcaacctcttcccgccgggttcacgccattctcctgcctcagccttccgggtagctaggattacaggtagacgctaccacgtccggctaatttttgtatttttagtacagacggggcttcatcat[136 bp omitted]tgtgccgggggaaagctgggcagtttccctcctccgagcccctgtacataccatgaattgtgggaccttcagagcttttcacttttcggaaaatagctcctgctggggctacaagatggagtgtgaagagggccttgggccacagggaggcgcctgtggactagggggagttcatgcaccccttctttccccagaggggctggactcaggtgagtatgggggtgggggctcctgcacttcgacacaggcagtgggagggttttctccccattccctctgcactcccaacttgagctatactttttaagaaagtgattcaccctgcctttgcccccttccccagaacagaacacgttgatcgtgggcgacatttttcattgtgccaaaaagttgccatgaccgtcattaaacctgtttaacaccaaataataaggaaaataaaataaaaaactcgggcttgacgcagaaactcactccaaataaattacctaccaaaacatttacataatggtggaaatattccaaaattcaatattttgggatttatacacaaaagataaacaaattagaggccaagaggctgccggaagggaaaaacggggcctggaatggccgacgtgaggaatgagctgggcctaaagaggccactggcaggcaggagctggacctgccgaagtggccgaaaggcaggagctttggactggggaggccgcagtgaggcgagagctagctgggcgtggagagtccgctgtgaggccgaggccgaggccgggcccgtgcaggccttcgagaggcaggaggccgggcctgcaaaggccgactggagatcaagttctgcgcctgaagaggctgccaaaagtcaaaagcagggcctgcgaaggccgccgagagccatgagctgggctgggctgaaagaggccactgggaggcaggaggagctgggcctggagaggctgactcgaggaagttttgcacctggagaggccgtcgagaggacggagctgggcccagggaggccgacttgctgctcttccaggcccacttccaggccgacttgaggacgacttgggcctgcagaggccgccgggaggctggagctaagcctggagagactgacttcgggacgatttgggcctgcggaggccgccgggaggcccaagctgggcctagaggagcccaccgaccggaggccatttggggcctgcagatgtcatcggagggccaggagctgagcctggagaggccaccgcgaggcctgagctgggcctggggagcttggcttagggaagttgtgggcctaccagggccgctgggagctgggcaggagctgagtccaaagacgttgttgggacctggagtcgggccagagtccggcctggagatgcagccgggaggaagagctgggcccggagggggcgccgggaggctgcaagtgggtctgagaggccaacttgaggaggcctggcctctgcctcccgcattgcccagctgttcctcctggctgcatctcccacctcccagcaaacaagctcttttggctcagctcccgcctgcgtttgtagaccccgaagtttctgcaaccaagctcttcagacccacatcccttctcccagtgactgaacagtcccagctccggctggagaagggcgtctgcagaccccgctgttgcctcccaggggagtctccaggcccagctctcgccccaccgcgacctcccaggcccaagtccctgcctacctcccagcagcccgagtgcgatcctgttcctccctcacggtggcctgttgaggcagggggtcacgctgacctctgtccgcgtgggaggggccggtgtgaggcaagggctcacactgacctctctcagcgtgggaggggccggtgtgaggcaaggggctcacgctgacctctgtccgcgtgggaggggccggtgtgaggcaagggctcacactgacctctctcagcgtgggaggggccggggtgaggcaaggggctcacgctgacctctgtccgcgtgggaggggccggtgtgaggcaagggctcacactgacctctctcagcgtgggaggggccggggtgaggcaaggggctcacgctgacctctgtccgcgtgggaggggccggtgtgaggcaagggctcacactgacctctctcagcgtgggaggggccggtgtgaggcaaggggctcacgctgacctctgtccgcgtgggaggggccggtgtgaggcaagggctcacactgacctctctcagcgtgggaggggccggggtgaggcaaggggctcacgctgacctctgtccgcgtgggaggggccggtgtgaggcaagggctcacactgacctctctcagcgtgggaggggccggggtgaggcaaggggctcacgctgacctctgtccgcgtgggaggggccggtgtgaggcaagggctcacactgacctctctcagcgtgggaggggccggtgtgaggcaaggggctcacgctgacctctgtccgcgtgggaggggccggtgtgaggcaagggctcacactgacctctctcagcgtgggaggggccggtgtgaggcaaggggctcacgctgacctctgtccgcgtgggaggggccggtgtgagacaaggggctcacacctctctcagcgtgggaggggccggtgtgaggcaaggggctcgggctgacctctctcagcgtgggaggggccggtgtgagacaaggggctcacgctgacctctctcagcgtgggaggggccggtgtgaggcaagggctcacactgacctctctcagcgtgggaggggccggggtgaggcaaggggctcacgctgacctctgtccgcgtgggaggggccggtgtgaggcaagggctcacactgacctctctcagcgtgggaggggccggggtgaggcaaggggctcacgctgacctctgtccgcgtgggaggggccggtgtgaggcaagggctcacactgacctctctcagcgtgggaggggccggtgtgaggcaaggggctcacgctgacctctgtccgcgtgggaggggccggtgtgaggcaagggctcacactgacctctctcagcgtgggaggggccggggtgaggcaaggggctcacgctgacctctctcagcatgggaggggccggtgtgagacaaggggctcacactgacctctctcagcatgggaggggccggtgtgagacaaggggctcgggctgacctctgtccgcgtgggaggggccggtgtgaggcaaggggctcacgctgacctctgtccgcgtgggaggggccggtgtgaggcaagggctcacactgacctctctcagcgtgggaggggccggtgtgagacaaggggctcacgctgacctctgtccacgtgggaggggccggggtgaggcaagggctcacactgacctctctcagcgtgggaggggccggtgtgaggcaaggggctcacgctgacctctgtccgcgtgggaggggccggtgtgaggcaagggctcacactgacctctctcagcgtgggaggggctggtgtgagacaaggggctcacgctgacctctgtccacgtgggaggggccggggtgaggcaagggctcacactgacctctctcagcgtgggaggggccggtgtgaggcaaggggctcacgctgacctctgtccgcgtgggaggggccggtgtgaggcaagggctcacactgacctctctcagcgtgggaggggccggtgtgaggcaaggggctcacgctgacctctgtccacgtgggaggggccggtgtgagacaaggggctcactctgacctctctcagcgtgggaggggccggtgtgaggcaaggggctcacactgacctctctcagcgtgggaggagccagtgtgaggcaggggctcacgcctctgggcagggtgccagaggcatgagttgggcatcaacaggccaccgtgagggaggagctgggccgcacgcgggctgctgggaggcaggcagggacttggccccgggaggccgccgtgggggcaagagctgggcctggagaggcccctgggaggcaagggcggggcctgcagaggctgttctccaaccagtgctagaactgtacaggccaccaggaggcaggaggtgggccctcagagcttggctggagaaagttcggggcctacaaaggcggttgggagctgggcaggagttgagccaaaagagcttgcttacttgctgggaggcagggccgggagagcccgacttcaggacaacttgggcctgcggcagtcgccgggaggcccaaccttggcgtggaggagcccaccgaccggagaccatttggggcctggagatgccatcggagggcaggagctcatcctggagaggccaccgtgaggcctgacctgggcctggggagcttggcttgaggaagctgtgggccgaccaaggccgccaggagatgggtaggcactgagtccaaagaggttgttgagaggcaggaatcgggcctggagacccaaccaggaagaagagctgggcccggagagaacgcccggagggtgcaagtgggtctggagaggctgacttgaggaggttctgggcccggagaggccgccggaagggaaaaactgggcctggaaaggccgttgtcaggaatgagccccatgggcctgaagaggccactggcaggcgggagctgggtgtgtagaagctgctgaaaggttgggagcttggcttggggggtccacagtgaggtagatgctgggcgtgaagaatctgctgtgaggcagacgttgggactgtagaggctgacgggaggcagaggctgggcctggaggggccaccaagatgcaggagctgggcctggagaggctgcaaagaagcatgagctgggcctggtgaggtcgacttgagaaagttcagggcctggagagaaggctgggaggcaggagctgggtctaaagaggccattgtaacgatggagctgtgcctgtggaggctgttgtgaggcagtagcctcatctgcggaggctgccgtgacgtagggtatgggcctaaataggccattgtgagtcatgagcttggtctgtagaggctgactggagaaagttctgggcctggagaggctgccgggaggtaggagctgggccaaaagatgtaagcacatttgcatttattaggcactttatttccattattacactgtaatatataataaaataattatagaactcaccataatgtagaattagtgggcgtgtcaagcttgttttcctgcaactggatggtcccacctgagcgtgatgggagaaagtgacagatcaataggtattagactctcataaggacagcgcaacctcgatccctcacatgcacggttcacaacagggtgcgttctcctatgagcatctaatgctgctgctcatctgagaaggtggagctcaggcgggaatgtgagcaaaggggagtggctgtaaatacagacaaagcttccctcactccctcactcgacaccgctcacctcctgctgtgtggctccttgcggctccatggctcaggggttggggacccctgctcaagtgcatccaaagcgacccttcccacaccagtcttcacagtggtcaagggcagcaaccacttagctcccaaggcatgtgcctcagctggcatttcgtcacaatcaacagtaagtggtagcttgagtcactgtgaggtcacctactggaaatcaccagcatcccatttcccactggcaaagagctcagcactgccccctgggaaaccaaacctatgcccaaatcccatctgtgtgggtttacctcctgggacccttcctaacatattagtcagagtccaatcaggaagcataaaccactcaaaagtttaaagtggtaaaatttaatacagagaattattcattataacaggtgaacagcataatgagagattggctagcacagagtaaagataactctagagaatatgggactagcccaggccaggcatggtggctcatgcctgaaattccagccattacagaagctaatgcaggaggattgcttaaggccaggagctagagaccgctctggacgacacagtgagaccctgtctctatccaaaagaagaaaaaagttagctgggggtggtggtgcacacttgtagtcccagctactcggaatgctgaagtttgagcctgggaggtcaaggctgcagtgaggcatgattatgccactacagtccagccggatgacagagcaagaccctgtctcaaagaacaaaaccacaacaaccatttacagacagaaaagaaatagagctaataagctgaggaaagatgttgaaatgtgacaagtaaagtaatatgaggtcttttgtctatttaaaataatcaaacaaaaaatggcttactaaattataataccctgtgctggcaaaggtgcagtgaaatgggcactttcttatactatgaggggtggttaaattgtgtataagccttccagggtaaagcctgtcaattttttaaaataatggagacagggtctcaccatactgccatactgcctcctccaactcttggcctcaagcaatcctcctctcttagcctcccaaagtgctaagattatagctgggaggcacccaaaaccctgtcaatttacatcaagggtaaggagaatgtccattcaccatgactcacagtaatcttacttctggggagacaattcaatctaagcaaaaggtcatctgtacacacacagtaaaaatctgggagtaactgaagacagagttggtaagtgaaataagaaacagttataagaaattaaactatggtatcaataggcacctggtaaaaggtcagttgatgttagctgctacttttttgttgttttgagacagggtctcactctgtcacccaggctggagtgcagaggcctgatcatgactcactgcggtctcagcctccctgggctcaagtgatcctcccacctcagcctcccaagtagctgggactacaggaacatgccaccacactaggctaattcatgtatttttctgtagggatggtgactccccctttgtttccaaggcctatcgcaaactcttggcctcaagccatcctcctgcctcagcctcccaaagtgttgcgattaccagtgtgagccaccacacctggccagctgctacttttatcaatattattcttattccactcaattaaaaattattattttcaaggctatgcaacagtatgtatcctacagcgtaattgtaaaaacatacacagtcgtcatccctcagtatacagaattagttccagccccccatctctgcatataccaaaatccatgcttactcacgtttcgctgtcacccctctagaatccacgtatacgaaaattccaaatgttagttgggcatagtggcaagcacctgtagtctcagccacgtgggaggttgaggtgggaggatcgcttcagcctggaaggttgaggctgcagtcagctgcgatagcactactacactccagccttggacaacagagggagaccctgtctcagaaaaaaataaataaataaataaagcaggttagaaactgtgatgaggtctgctgggcaaaattccatataagcaaagtataaattaataaagcaaatcgtgataaattagtacgattgactttctggagtttctgacaataaaagtaaggaaaatgcagaacacaaagacagagagtaaaaagagaaattaggaaagcattctacatgttgaataggaagacactggccatgttcgtgcagcggcagtatgtcgtgacatgacataccttggagagaagttaacagatgaggaagttgataaaaatcatcagagaagcaaaatactggtagcgacactcaagtaaaccatgaaatttccataacttatgtcagcaaagtgggaatattgtacagtgtgtgttgaagttcctatacaacattgtttatctgccttttgtttgtttgtaaggaatgtatatactaaaagttcttcttgctgtcaaaagaatatgcgtgaataagtcattttaacttattcttctgtttttcttttatcttcctgccatcatcccacagccttactttagaaatttcttttttagaaaattgaacaagtgctccttgtggtggcacatacctcgaggatgggaggcaggggtggaagggtcacttgaggccattagtttgacaccagcctggccaaaaaagtgagaccctgtgtctacaaaacaatttaaaaattagccaagtatcgtcatgtatacctacagtcccagctacctgaacttactgagaaagttcagggcctggagagaaggctgggaggcaggagctgggtctaaagaggccattgtaacgatggagctgtgcctgtggaggctgttgtgaggcagtagcctcatctgcggaggctgccgtgacgtagggtatgggcctaaataggccattgagagtcatgagcttggtctgtagaggctgactggagaaagttctgggcctggagaggctgccgggaggtaggagctgggccaaaagatgtaagcacatttgcatttattaggcactttatttccattattacactgtaatatataataaaataattatagaactcaccataatgtagaatcagtgggcgtgttaagcttgttttcctgcaactggatgttcccacctgagcgtgatgggagaaagtgacagatcaataggtattagactctcataaggacagcgcaacccagatccctcacatgcacagttcacaacagggtgcgttctcctatgagcatctaatgctgctgctcatctgagaaggtggagctcaggcgggaatgtgagcaaaggggagtggctgtaaatacagacgaagcttccctcactccctcactcgacaccgctcacctcctgctgtgtggctccttgcggctccatggctcaggggttggggacccctgctcaagtgcatccaaaacgacccttcccacaccagtcttcacagtggtcaagggcagcaaccacttagctcccaaggcatgtgcctcagctggcatttcgtcacaatcaacagtaagtggtagcttgagtcactgtgaggtcacctactggaaatcaccagcatcccatttcccactggcaaagagctcagcactgccccctgggaaaccaaacctatgcccaaatcccatctgtgtgggtttacctcctgggacccttcctaacatataaccttcataacatacttgagaggctgaggtgagacaatcgatttagcccaggagtttgagatcagcctggacgacataactaaatctcatctctacaaggacgaggtgggaggatcacttgagcccaggaatttgtggccagcctgggcaacaaaagaagaccccatctggccaacatggccaacctggccaccacggtgaaactctgactctacaaaaatgatctgggcatgggtggcatgcgtgtgtagtcctagctacttgggaggttgagatgggaggattgcttgatctcagaaggccaaagctatagtgagctatgatcacatcactgcactccagcctggatggcacagggagattctgtctcaaaaaaaagaaaagaaatatatatttaatctctgtccctggttcctggcacagagcttctaaagctcttacaaagacctcagtgatagatgtgacaggagcatcttttgttttaatatttggtcttggtcccaggtttctaacacaagagcctctaagaactttgggatctccagcatggtaagaatgcatttggggatgttgttgagatgactgggtgactgcaagctcctaaatttcttcaagaggagggctgattaccatgaaaccacatggtaagaggcttggaactttcagcctcatgcactgaactccagggggaagaggggctggagactgacttaatcaccaacagccaaaggttttatcaatcatgcttgcataataaagcctccataaacaccctgaaaggggtgtgcagagctttcagggttgctggacacaggagatgctgggagggtcgcatgttcaacagagggcatgggagctctgtgcccctccgaacttaactttccctgggtatctttcttttttttgagacaggatcaggctcttttgtccaagctggagtgcagtggcacaatctcagcttactgtaacctaagcctccccagtccccagctcaaggtatcctctcatctcagcttccctagtagttggaactctaggtgcacaacaccacaccagttattattattattttttaattttttatagagacaggttttcaccatgttgcccaggctggtctcaaactcctgagtttaagcgatcctcccaccttggcctcccaaagtgctgagattacaggcatgagccactgcatccagcatgcacgtctctttcattgactgtttctgagatgtatccttcacaatgaaccagtaataggaaatgaactggccagatgtggtggctcacatctgtaatcccagcactttcagaggctgaggtgggaggatcacttgagaccaggaatttgtggccagcctggccaacacaacaagaccccatctatacaaaaaataaaagaaactagccagatgtggtggtgcaggcatgtagtctcagctactagggaggctgaggtgggagaaccactggaacccagacaatcaaggctgcaatgagctatgactgcaccattgcacaccagcctgggcaacaaaataagaccctctctctcagaaaaaaagaaaataaactgtttttctgagttccgtaaactgttctagcaaattattaaacccaagaagacagttacgggaacccccgattggtaacaggttggtcaaaagtatggtgacaacttaggacttgccattgtcatctgaagtgaggatggcctcgtgggactgagcccctaacttgtggggtctgtgctaactccaggtagtgtcagaataaagtcatgggatacccagttaatatccagagcactgaagaatctggtgtagaaactccatacatacattcagtcggaagtgtgtgagtagagacaaacatgggcttttctgtcacctacctgcttaactgcataggagaggcaatatgtggtgctcatgaacaaagcaaacattaaagtcagaccagacccaacatttgactcagtcttaatatccaggtgagcctgcgcaaatcattcattattcctaaggttttcatcactccattcataaaatggggataactgtggcacctacatgtgattctgtgagaattaacaaaatattatgcttggggttattgtgatcattatacctgttccaaactatttgacaaggacagtgatggatgaagacatcaaaaaatcagaaactgcaatgaggtctctcaggcaaaattccatacaagcaaattactgtgtctacaaagcattcctgccacacttaattcaccattccctgaacaaaatatgccatcttcattgttcaggtctgtacagtgctggtgtcccttcccgggcagtttgcgctatcccatcccggcccattccccatccctccacctcccccttccctccccactctcatacaactcttcctcatctttcaggacttggcttcaatgtcaccttaactggaagcttctctcactctccagaagagcttcccattgcacctgatgcatgggaaacataatttgatcatttttaagttacagtccaaatctttttgtacctgaataacatgttgcccagtcagtctctcttcctggattcacaagtctttcatggtagatccagctggaagtgacaaaaagacatcttttgacataaagggatgacacagacagacataagttcttaaatgtcttaaatgttatgtgaaaattaaacagaattcaaagacttgtggggagcacttaggaagttactgggaatgtcataaagggttaatttgtattttattttattttttgagacagtctcattctgtcacctaggctggagtgcagtggtgcaatcaggctcactgcagccttgaccacctgggctcaagtaatctcacttaatttttatttggtttaagaaactcttggttgagggtggtggcttatgcctgtaatctcagcactttgggaggctgagagaggtatattacttgaggccaggagtttgagatcagactgggcaatatattaagaccctgcctctaccaaaaaacagagtgaacgtgtggaagacaatttttccacagactgggaatgagggaataatttcaggatgattcaagtgcattacatatattgtgcactttatttctattattactacatagtaatatataatgaaatgattctacaactcactataatgtagactcagtgggatctctgagcttgttttcctgcaactagactgtccacctggggtgatgggagacagtaacagaatatcaggcattagattctcataaggagtacacaacctagatccctcgcatgcacacttcacaacagagtttgtgctcctatgacaatctaatgctgctgctgatctgacaggacatggagctcaggtggtcatgcaagcgatgggaggggctagaaatacagatgaagtttcccttcactcgcctgctgctcacctccagctctgtggccctgtggttggagaccgctgctcaagtgcatttgaaaggaaccatcccacgccgttcttcagagtcatctttactgctgcagtggtcaacttgtagcacccctaagcttgcaggacatatgcttcaactggcatttcacaatcaacagtatgtggcagcttgagtcattgtgagcgcacttcctggaaatcaccagcatcccatatcccattgcaaggagctcagcactgctccttggataaccaaacctattcccaaatcccatctgtgtgcgtctatctcctggtacccttcctagcatcaattctgtatttgtaggagtccaatcaggagacacaaaccactcaaaagtttaaactagaatgagcaagatggctcacacctgtaatcccagaactctgggaggccaaggtgggtggactgctttgagctcaggagtttgagaacagtctgggaaacatggcgaaacctcgtctctacaaaaaacacaaaaatcagctgggtgtggtggcacttacctgtaatcccagctactcgggaggctgaggcaggagaattgcttgagcctggcaggtggaggctgcagtgagcagaggttgtgccactgtactccagcctgggtgacagtgtgagacccggtatcaaaaagaaaaaacatatatatatatatatatatatatatatatatatatatatatatgtaaatttaatataaaaagtattaattttggccaggcaaaatggctcatgcctgtaatcccagcactttgggaggccaaggcagacagatcacctgaggtcaggagttcgagaccagcctgaccagcacagagaaaccccatctctactaaaaatacaaaattagctgggcatggtggcacatgcctgtaatcccaactactcgggaggctgaggcaggagaattgcttgaacccagaaggtggaggttgcgctgagccgagatagcaccattgcactccagcctgggcaacaagagtgaaactccatctcaaaaaaaaaaaaaaaggtattaatttttacagaggatcagcacaatgagggacacactagcacaaagtaaagacaactctagagaatacggaactagcagaggccaggcattgtggctcatgcctgtaatcccagcaatttgggaagcctaggcaggaggatcgcttgaggccaggagttggagaccaatcagtgctaaatagtgagactctgtgtctaccaaaaaaaagagacattagccaggtgtggtggtggtgcacacccgtagttccagctacttgggagtctggggtgggagaaatcccttgagcctgggaagtctacactacagtgagccaagattgtgccactgcactccagcctgggtgacagagtgagaccctgtcttagaaagaaaaaagaaaagaaagtgttaatccccctatgggaatctcctcttctcctgccctctctggaacctcacttgtcagttcttcctcccactttcctgtatctttaacctatcccccacttttagctccttcccatcatcatttaaattactcaaacttcttctgttttaaaaacctctccctaaactcagggagaggtcttctgcacacacattgagccatctgctcttcctggtgccttctctacagcagcctgagccatgtctctaatctatgaatctcatcatgttactcccccatttacatcacttctccttgcctcagggattaagtccaaactccttaacagcccctgctctgccctgccttgcaaggcagcctcactgcttgcccctctccattacatctgctatggagtccaactgagcctcatctgccccttgaacgcacactctttctcctctgggagtctctgaagtgggtaatatcctctgcttataatatgcttccccttaaacctctactctcttcctagctagctttgactcctctgtcacttgtccgctttggcatcacctcctcatagaagacttctatgactcccgagattctcaggagcatggcaggtgaagtgctcctcccatgaatggatggagattaaggagtgtgtgttattcatgcttaattcaccagtgcttagctgagtacctggcataaaatagttactgtggtggccaaagtaataacccccaccgccaccaattgctcatgtcctatgttacacagcacaattacataggaagggggaattaagagtgcagataaaattaatgttgctcatcagctgaccttaaaacaagattatcctggagtatctaggagagcccatgtaattacaagcattctttaaaactggaagagggaggcagaaggttaagaaccagagacggtgggcacaatggctcatgcctgtaataccaatactttgggaggccagggtaggaaaatcccttgagtgcaggagttcaaggtcagccatggcaacatactgaggtcccatctctacaacaaaataaaaacaaaattcactgagtgtcacgatgcttacctgtagttccagctactgggaaggctgacatggtaggattgcttgagcctgggagtttgaggctataatgagccatgataggaccactgaactccatcctgagtgacagggcaaggtcctgtttctgaagaaaaaaaggacattggaatcagggccctctccatgctgaggtgcctacaaggcatctctctctgcaaatgagtaaacatcaccctccaactccttacagagtggagcaacaggaaaactccttcacctcatttctgtgctgcttgggaggcctggacagcccaataaccagctcctcactgatgaagcaatcaggaaatggctcgagttgagctaaggagaatttggatccttcctttggttctcagtaggcagggtaggggccaggcatggtggctcatacctgtaatccttgcactgtggggggccaaggtgagaggattgcttgaggccaggagctcaagaccagcctggacaacatagcaagacctgggtggcatacacctgtggtccctactacttggtaggatgaggtgggaggattgatcacttgatcccaggagtttcaggctgcagtgagccatgatcacaccactgcacttcagcctgggtgacagagccagaccatgtcacaaaaagttagaaaaaaaaaaaagagagggagagagactatacacaggcaccaccacatttggctaatttttaaatattctgtagagacaaggtcttgctaggttgcccaggctagtctaaaactcctggcatcaggctgggcatggtggctcatgcttgtaatcgcagcactttgggaagctaaggcaggcaaatcacctgaagtctggagttcgagaccagcctggccaacacggtgaaactctgactctatcaaaaatacaaaaatcagctgggcagtagtggcgtgtacctgtagtctcacctactcgggaggctgaggcaggagaatcacttgaacctgggaggtggaggttgcagtggaccccatcactgcactccacccctgggtgacagagcgagactgtcaaaaacaacaacaacaataacaaaaacaaaaacaacaacaacaaaaaaaactcctggcatcaagacatcttcctgtcttagcctcccaaagccctgggattatactgtttcctataattgaagacacttgttcttatactgctttaaggtataaaggaagaaaaaaaaaacagataatgacaaatgttggtgaaggccgggcatggtggcagcctgtaattccagaacttagggaggctgaggtgggcagatcacttgaggccaggagtatgagaccagcctgggcaacatggtaaaatcccaccactacagaaaaatctaaaaattagccaggcatggtggcgtacacctgtaattttcagctacccaggaggctgagatgagagaatcacttgtgcctgggaggtcacggctgcagtgaactgtgatggcatcattgcactgcggcctgagagacagagcaagcccctatctagaaaaaaaaaatgtcagtgaagatgtggaggaattggaacccacatacattactggtgggaacataaaattgtgtaaccattttgtttgggtatttcttttcttgtcattttaattggatttttaaaaaatcaagacggggtttcactatcttgcccaggctggtcttgaattcacgggctcaagccatcctcctagctgagcctcctgagtagccgggattacaggtgtgagccattgcacccaactggtatagccacgttagaaaacagtctggcagtttctcaaaaggctaaatgtacagtcatcctataatgcaacaatttcactcctaggcatatatcccagaaaaataaaaatatatgtccacacaaaaacttgtacaacaatcttcatagcagcattattcataatgaccaatacgtggaatacatggaaacaacccaaatatccaccaactgatgaacagataaacaaaatgcagtgtgtctctaccatggaatactgccatagaaggaatgaaatattgatacacactatgacataaaggaactttgaaaacactgtgctaagagggaaaaaaagccacaaaagatcacatattgtacaattctatttgtccagattaggcaaatctatagtgacaaaaaattaatcaatggttgcctaaggctgggggcaaaggtaggtggggagagtaggaggtagtagctaaggggtatggatttctctatagggtaatgaaaggttctaaaagtgactgtggtgatcgatgcacagctctgtgaatattctaaaacctactgaattgcagatttcaataaataaagtgaatggcatttgaatattttaataaagctattatttaaaataataataatagggggctgggcacaggtggtcatgcctgcctgtaatcccagcactttgggaggctgaggcaggaggatcacttgaggtcaggagttttgagcccagtcggagcaacatggcaagatcccgtctctatgataaaaaattagctggacatggtggcacatgtctgtagtcccagctacttgggagactgaagtgagagaaccacttgagcccaggagtttgaggctacagtgaaccatgatcatgtcactgtactgtagcctaagcaacagagcaagacgctgtctctgaaaaggaaagaaaacaaatgcaagtttttatcactttgtgagtgtagccaagttggaggagaaatagacaataataaaagagcactgaataatgacggtgagtggctggttaggctcagttgctagctaaatggcttctaaaaaattcaataaagttacagctctggggacagtcatgtagtcaaagaatgaaggcgaaattcattacaattgcccatggtctttatttacatgccttctagtgaaaaattcctaagtgcctaaacagcaagtctgcaatgatagcagctgtttattaaagactacaaaaaagaaatggaggccgggcgtggttgttcacatctgtactccttgaattttgggaggctgaggcaggcagattgcctgaggtcaggagctccagaggagcctggccaatatggtgaaatcccatctctactaaaaatacaaaaattagctgggtatggtggcgggcacctgtaatcccagctactcgggaggctgaggcaggagaattgcttggacccagaaggtgaaggttgcagtgagccaaaatcgcaccattgcactccagcctgggtgacaagagaaagactcttatcttaaaaaaaaaaagaaaaaaaagaaatggcatcttcttcaagaattacatcgtgtttcatgataaagaagctctaattttgcatttgttcaagtattgatgagatttacccaatatgacacccatcttggataaaatgcaaacaacacaatttcattttgtcattaacaaaaccgattaagtagtctaatataaattgcgatcttattaaaaactgatcagattaaaaaaattatggaattatggagccaataagatgttacaacctgttccaaggggaattccaaaatccacacatatctgagaccatcaagtatgatgaaatatatttgattactatattgaaaaataaactgattacatagccaacaattggacaggggtctcctcatccacagccacacaaacccgatcatgcagctatgtggttacaaggcctacatagcctagaagggactggtctgacttgagatttcatttgtatttgtattttgagacagggtcccactctgtcacccaggatggagtgcagtggtataatcatagctcactgcaaccttgaccaactgggctcaagagatgctccagcctcagctgcccccatacctgggaatacaggcaagtaccaccatgtcaggcatttttttcatttttgtagagagagaagacttgctatgttgcccaagctggcctcaaactcctagaatcaagagatctgcccatctcagccacatgagtaactggggccataggtacataccatcatgcctggctatatttattttattttattaaatttattttttttatttttgtagagaggaggtcttgctgtgttgcccaggctgctctcaaactcatggccttaaaacatactcccatctctgcctctcaaactgttggaactataggtgtgagccactgtacctggcctgacttgggatttcttttatctagcatcctttacttggtaggattgggaaaagcagtagtgttttttaaaattacttaataattcaatcagaatcaaactcaaccttgaccactgccttctctcacagctcacaaccagtctgtcaggaaatcctactgactgacttcaatatgtatccaggctctaaccatctctcaccaccaccatgaaccccgtcaggatcactatcatctcccaccgggatgttgccacagcttggcccccatgcttctacccaaatcttcccatagtctttctcaactcggcagccaggtcgtgcttttaaatcaggagacggatcatgtcgcctctctgctcagaagccctcggtggttcccattttagtcagagtaaaagccaaagccccagcaatagcgtcccagggcttacacgatctgtaccgatcccagcccagcaactccctggcctcctcgctgacttcgctccctctatctctttgctccactggcctccttccagagcctcagacacaccagagagtttcctcctaatgcctttatcctgttgactcagcctacaatgctcttccctcagcaccttggccagctccatcacctgcttcaaacttttgctcaatattcacttatgaggccaaccctgaccactctacttaacactgccatctgtccccattcccaccatgctcatttctttctttttgaaacaaggtcttgctttattgcccaggctggagtacactggtgcaatcacagctcacagcaacttcaacctcccaggcttaaacaatcctcccgcctcagccaccctaggaactgagactacagctgcatgccacaacacatggcttttttttttttttttgagacggagtctcggtcgcccaggctgaagtgtaagggtgcgatcttggctcactgcaatgtctgccttttgggttcaagtgattctctgcctcccaagtagctgggattacaggcacccaccaccacacctggctaatgtttgtatttttagtagagatggggttt[141 bp omitted]gttgcccaggctggtcttaagctcctgggcttaagcgatcctcccacctcagcctcctaaagttctgggattacaggcgtgagcaactgtaacatgaggtcccagcttcatgttcattttttgttgttgctacaacaaagtaccctacatttagtggcatcaaacaccacaaatctaccatcttacagttctgggggccagaagcccaactaggtctatcaaggctaaagtcaaggtgtcagagaggctgcattccttctgggggaggctctagacagaatgtgctcctttgccttttccagcttctagaagccacctccattccttgacttacctcgtgactccatattcaaggccagaagtgcagcatcttcaaatctccctctctgacctcttcttccattaccacatcactttctctaattctgactctcctacctcattctcttataaagatccttgtgattggtgggtatgggggctcccatctgtaatcccaacattttgggaggccaaagaggaaggattgcttgaggccaagagttagagatcagcctggggaaaataggaagatcctgcctttacaaaattaaaatcagctggacatggtgatgcatgcctgtagttccagctactggagaggctaaggtgggaggattgctttagcctaggaggtcaaggctgcagtgagctatgatcacatcactgcactccagcctcagtggcagagtgagactctgtctccgatataagaaaagaaatatacatttggtctctgcccgtggttcctggcatagagcttccaaagctcttataaagcccttcgtgacagaggtaataggagcattttctgttttgatatttagtcttagtcccaggttcctgacacaagggcctctaaggtctttcagatctgcagcatggtaagaatgcatgtgggatgctgttgagctaacagggtggctgcaagctccgagactgcttcaggaggagggctagctgccagagaaagcaaccacttttttttttttaaacggagtttggctcttgtagcccaggctggagtgcaatggcacaatctcagctcactacaacctccacctcccgggttcaagcaattctcctgcctcggcctcccgagtagctggaattatagggatgtgccacaacgcctagctaactgttgttatttttagtagaaatggggtttcaccatgttggtcaggctagtctcaaactcttgacctcaagtggtccatgtgcctcagccttccaaactgctaggattacaggagtgagccaccgcacctggccccaaccacattttttgaggcttggaactttcagcctcacctgctgaactccaggaggcaaaaggaactggagattgacttaactaccaatggccagtgattttatcaatcatgcctccataaacacccaaacagcagggtttggagagcttctgtgttgctaaacacaaggaggtcctgggagggtagtgtgcccaacagagggcatggaagctctgtgcccctccccacttaccttgtcctgtgcatctctttcattggctgttcctgagatggagccattacattgagccagtaatagaaaataaggtggccagatgcactggctcatgcccgtaatcccagcactttgggaggcagaggtgggcagaatcacttgagcctaggaatttgagaccaacctgggcaacataagaagaccccatctatacaaaaaataaaagaaattagccaaatgtggtggtgggaaccctgtaattccagctacttgagaggctgaagcaggagaatcacttgagccctggacgttgaggcttcaataagctatgattgcaccactgcacaccagcttggacaacagagcgaggccctgtctcttaaaaagaaaagaaaaaaaacttgtttttctaagttctgtgagttgttctagtaaataattaaactcaacaagagggtcatgggaaaccctgatttctaactggttggtcaaaatacaggtgacaacctaggacttgcaactggcatctgaagtgagggtggtcttgtgggactgagcccctaacctgtgggttctgtgctaactctaggtagtgtcagaatggaattgtgggatacgcggttggtatccagagagttggagaactggtgtagaaactctgcacacacatttggtcagaagtctgtgagtagagagaaacgtgttgcaggaagtcagggaccccaaacggagggactggctgaagccacagcagaagaacataaattgtgaagatttcatggacatttattagttccccaaattaatacttctataatttcttaggcctgtcattactgcaatctctgaacataaattgtgaagatttcatggacacttatcacttccccaatcaatacccttgtgattttctatgcctgtctttaatctcttaatccggtcatcttcgtaagctgaggatgaatgtccccgcaggaccctgtgataattgcgttaactgcacaagttgtttaaacaatatgaaacctgggcaccttgaaaaaagaacaggataacagcaatttcagggaacaagggagataaccttaaactctggctgcctgtgggccgggttgaacagagccatatttctcttctttcaaaagcaaataggagaagtattgctgaattctttttctcagcaaagaacatccctgagaaagagaatgcatccctaaggggaggcctctgaaatggccgctttggggacggctgtcttttacagtcgtagataagggatgaaataagccctgggttcacgtggcgctcccaggcttatcaggacaaggaaattcccgcctaataaatgttggtcagatgggttgtctgctctcaaaccctttctcctgataagatgttatcaatgacaatgcgcgcccgaaacttcattagcaattttaatttcgccccggtcctgtggtcctgtgatcttgccctgcctccatttgccttgtgatattttattaccttgtgaagcatgtgatctctgtgacccacaccctattcgtacactccctcaccttttgaaaatcactaataaaaacttgttggttttgcggcttggggggcatcacggaacctgccgacgtgtgatgtctcccctggacatccagctttaaaatttctctcttttgtactctttccctttatttctcagactggctgacactcagggaaaatagaaaagaacctacatgaaatatcaggggtgaatttcccccgatatcacactggctcttctctcacctgtctacctgcttaacttaataggagaggcaatgcatggtgctcatgaacaaggcaagcattaaagtcagaccagactaacatttgactcagtcctaatattcaggtgagcttgggcaaatcactcattaaccccaagtcttcatcattttgtgcatataatggggataactgtggcacccacctgtttttgtgagaatcaatgaaatattatgcttgatgttattgtgatcatgatactatctgacaagggcagtgatgcatgataacatcaaaaaattagaaactgtaatgaggtctcttgggcaaaattccatacaagcaaattactgtctctacaaagcatttctgccacacttaattcaccattccctgaacaaaatgtgccatcttcattgttcaggtctgtatagtgctggtttccctgcctgggcagctcactccatcccatcccagcccaatccccatccctccacctcccccttccctccccactctcatacaactcttccttatcttacaggacttggcttcaatgtcaccttaactggaagcttctctccctctccagaagagcttccgattgcacttgatgcatgcactattatttgatcatttttgagttacagtccaagtctttttgtacctgaataacatgttgcccagtcagtttctcttcctggattcagaagtctttcatggtaggtccagctagaagtgacaaaaagacatttaaaaaaaaaaaaaaagagggatgacacagacagacatcagcacttagaagttttaaacgatatgtgaaaaacaaaatttaagggcttctaggagaaatgtaggagggaaggtgttactgggaaatatgatagaaggttaatttttattttattttatttttagagaaagggtcttgctctatcacctaggctggactgcagtggtgcaatcacagttaactgcagcctcaacctccagggcttgagcaatattcccatctaatttttattttgtttaagaaatgcagtcttgctcttagcaaagctaaagtgcaatggtgtgatcatagcttactgcagcctcaaccttctagactcaagtgatcctccagtcttagcctccccagtagctcggactacaggtgtgcactgcaacgtgtagctcattttttttttttaatttttagtagagacaaagtgtcactatgttgaccaggttggtggtgatctcctacactcaggcagttctctcacctcagccttccaaaatgctgggattacaggtgtgagctgccacacctggctgagggggttaatttttaattatataaagagctcaaagcaaatattagaaggagcctaaatgcctccagcagttgactggtactggtaaattgtgatacatccatataataaaatattatgcaaccatgaaaaggattaagatagatcaataggtattggcacaaatgtccacgaaatatgaaaatatgaagtgatgttcaatcaccatgtacgtatcttgaaggatatggcccattttctcaactgcaattatttcctgagataagattatgggtctaaagagtgaaggacatttttcacttatttaaaagtatttatcatttttataatttaataaaagattaaacagatcattgaattagtaaaagacaaagtaactctataaataaatggaaaagacacagataccccaggcatggtggctcatgcttataataccagtactttgggagggggtggtggggggattgcttgaggccaggagttccagaccagcctaagaaacaaagcaagacctcctctctagtaaaaataaaaaaataaaaataattggccaggcatagtggcatgtgcctacagtcccaactactgaggtggaaggatcacctgagcctaggaggtcaaggctgcagtgagttgagactgtgccactacactgaagcctaggagacagagcgagacttcatctcaaaaaaaaaaaaaaggacaataaagaaataaagctaataagctaacataaggaaagataaaatatgtgacaaataggctgggcacatggctcacagctgtaatcaagcactttgggaggccaaggcgggtagatcatgagatcaggagttcgagaccagcctgatcaacatggtgaaaccacgtttctactaaaaatacaaaaattaaccaggcatggtggcatatgcctgtaatcccagctaataggaggtctttcatttatcacacagaaaataacttgttaaattataatacctgtgtgggcgaaggtgcagtgaaatggccattttcttgtagtattagtggtgtttaaaatgtatataagccttccagcataaagcttggaaattttttttaaatcatacagacagtgactcattatactgcctcctccaactcctggcctcaagcaatcctcccacctcagcctcccaaagtgctggaattacaggctgacagccaccatgcctgaaagctttgcaatttacatcgagggtaataagaatgctcatgccctgtgactcacagtaatctcacttctggaaatttcacctttggatataattcaacctaaacaaaaggtcatatgcacaaacacagtgaaaatctgggagtaatttttttctctttttttaaaaaaatatggaatgcttcacaaatttgcatgtcattctttcacagaggccgtgccaatctctctattgttccaacttaagtatgtgtgctactgaggcaagcatgagtaatttaagatagggtggttaagtgaaataaggaagaattatggagaatttaaaaatctatgctatttataggcacctagtaacagctcagtaaatattagctgctactattattatttttatggtaatttcactcaattaaaaactgtcgttaaaaattaccattgtcatggaacataatgtctcctactgtataattgtagaaacagatacaatttgtcccttggtatatggggggattagttccagctctcccatttctgtgtataccaaaatccacgcatactcaagttttcgaagtcagtcctgtggaatccacatataacacaaatgggaaaattagtgaggtgtggtgacaagcacctgtagtcccagctacttgtgaggctgaggcaggaggattgcttgagcccaggaggttgaggctgcagtgagccataattgcaccactgcactccagtctgggcaacagagtgagacagaaggttgactttttaatagaatttttctgttcacttgaagatatggtcaggattgtggcatatgaaaattcttcataaaataactatctaatccaattaatgctggaattgggaacagcagaagtgtcatctcacagctactcgcaatgaaaggtgatgtctggggctcaggtgtgttgaggtccccatgccgggactatgggtgctgagtgggatttacttgtccatccattttctatattccagcactgggaaactagggacagtacttgttctcaagggaatcttcagcttaggtggctctgtaaaagagaaattacatcattgaaaaatcgtcgcaggtcaggtgaggtggctcatacctataatcccagcccactgggagactaaggcaggaggattccgtgaggccaggagttcaagaccagcctgagcaacacagtgaaacctcatctctacaaaaaattagaaaatgaactgggtgcggtaaaacattcgtatagtcccagctactctggaggctgaaataggaggatcgcttgagcccaggaagtggaagctgcagtgagctctgatctcaccactgcactctagccttggtgacagagtgagaccctgtcttaagacacacacaaacacacacacacacacacacacacacccaatctcactctgtccagccttgactaatcaaaagggccttctggttacagaagaggtatgctcttttgtaggacagggagagaccagcaagcttgttcacagacttttcctcatcctctgcttagttttccaagaaccctcacagtggaaatggagtctctgggaaaatgacctaaatctttgggttaccaggggagaaatatgcctcctttgtcaattaataaatggaacatctgccttaaaatccagggagttctgctagaatgaatcactccctaagaccc[217 bp omitted]gaggcaggaaaatcgcttgaacctggaaggcggaggttgcagttacttctagaagaatttccattagccctttgaaatccttcaacattcatgaaggccaaagagttttcacctaatttaatctgatgggtatgtgaccagagtctttctagggaatagagactcccaaacagttcgactgggaagtgaggagagaatttattactcaaaaccaaagggaaatgaaaagaggccaacatagaatgtcattattctttcttggtggggaatggattccagagtcattctgtgacctttacatgacctccttattagcatctaaaagcttccagtgtaggatgcagccagctaggttctcttctaatgtaataaaatttgcttcagcaaatcttatgcagagccatctccaggctccagaaacaataggctataaattactggatctcccatttgatacaatgaagtatgagcatggtcctgaatgactcctctacatactactctgggtggcttgaagtgaatttgatacaagaactggagcgagggcaaagcagagctagatctaggattaatgtgcttgggcccagctcctcactactcacctataagtctagttccagaacccaagtagaggatggggaaacaaggctcctgactttttttccctaatgtctgcatctctttcacatttcttatctccttgcaaagaaactaaacaggctcaactgaaataactaaatgattaaaccctatacagagactctccaaagactgacaaaatatcattcaagactgttacacagacaaccttgaggatgacttgatgtaccagtgatctacaatatttgggatcattccaaattcccatcaaggatctgcctatatcaacaaaggagccaaggaccaaccattcaaatgggccctgctgccaagcctttttttttttttttaacaatgccatctcttcatattgttccatttaacaaaactgcagcccttcatctatccttaagtcccttggccaatggtacagggccagagtatgctactccctagcaggaaatcaacaggatgacctactaaacaccattcagaagatgctaagacccatgaattgcaacaggaaagaaaagacagagaattagtcagacaggtacatgctgtgccaaaaatgcactacagcccccacccaattctgcctaatcctagctgggctgacaccaacctgatgagacaggcctataagatctcaaactaaaacagaaactcctgaactgggttctttcgagcccaggaagcagcagtaaatcattaaagaacagataagttcttaaggtgagggagagtttcagataaatggaatgctggtagaacacagggcccaaaggagcaaaagttaacctaagcccaggtagaaccttgtttactagagtattaggcatgggtttgggcaactattctaaccagagaaactggcttcagtgagggcaagttggcaatccaaggtatagcatgcatagggctggcaaaattcagggtgactgaagcaaaagcttcataaccagaaagaccacatctgggggtagagcacaaaactctcaagagatgaatctttgtaagagtgaggcagaactatatagcagttttaggagatctgttggtgcccagcaagagctccaaacgggctatatgcagggatgcaggctgtagtctcaggagaggaggttcacaaaagtcattcagtccaagacctcaaactgcgttctctactaaaaggaatcaaggttccctagagaaacggctgactccatgtatggtgcagtatattgatcctggaacatctgttttgccagaaagcaagaaagccatcaaagtccaacaggatcacgtcaaaaagacatgaaagtcaacttgaagagataattattaacctagatgagacaatgtaagcatccaaaacaataaagactgcaatggcctgaaatacatcaaatgcaaacaataatctatgagttcataatggtattcagaaaaaaaaactactggtcattagagggaaggttactaggtcactaacttactactctgaaaagtgacttaagatgagaggtagggtggagaattagctatttattcagtctttcctgtacaaacataaatttttagggagattgaagcagatgaaacaaatctggaaaaatggaggtaactgcttaatctgcgggttgggtgcatggaggttcaacatatttcttttgtgtatatttgaaccccctacaaaaaaagcacaagacagaatgtgagccaagcagcttagggtttaggcaaggcttctgcctacaagagacactaggatatgaggggtagttttagccctaatgggctgagccaactggaggtatatagggaagtgctaaattgcagaggtatcatgttgcccagcacttgatcaaatcctagatcctaggtctgcttggtggcatgcttcctaagtagtggatctgaggctacctatagaacttcctttgcagtcatagttcgctcagaaactacaaaagtgcttgctcttgaaaatggagtctttgtccatttcatgcttctataaaagaataccacagactgcataatttataaaaaggaaaaaaggaaggaaagaaaaaaggaagggaggagggaaggagggaaaaagggaaggagggaaggaaaggaaggaagggaaagaaggaaaggaaggaagggaaagagagaaagagggaaggaggaagggagggaaggagggagggagggagagagagagggagggaggggaagggaagaaaagggaagagaagggaaaggaggaagaaaaggaaaggaaaggaataaattttatttcttaacagttctggatgttaggaagtccaaggttgaggggcctgcatctggtaagggtcttcttgctgcatcatcccactacagaaggcagaaggaaaagagagtgcaagaaagcaagagggcaaaaggggctgaactctgttttataataagcccactctgtgattactaatctattaccacaataacaacattaactcattcatgaaggctattttattaggccccacatcccaactgttgcattgaggattgagtttccagcacataaactttgggggacacatttaaaccatagcagagcacttaggttaattcaactaagaggagctgggaaaatcaaaggcatgagaaagacagcaaaagctagcagagagaaatgcataggttaaggaaaaaagtcacagtgaatcctgtagtgcaggctactttatcaaaagcacctaaaaaagatctcattaactcccccagctcacctccacgcacatctaaagagccacacacagcaccaccaaaggcagcacaatgagaacagcattctcctcaacagacaagctgggagtatctagacacccgacctcaatagctccagaacagccctaaaacatttcctccctaaccaccactcaagtcaccagcttggaaagtattaagaaaacccaaatcctgacacaccactatgaaacaacttaaaacagcaaagaacaacccatttaaacagcaatgccagctgttggggaaaaaaggaacaatgagtagaggagaaacagaccactcggggtccaccaagacccagtctctcagcttcagcacttttaaatgcagaatccatatccctctggggcctgtggagctccacaaggcatgtcgtcctcaaagataaatgagcacgcaagctggctagaaaaccactaagggtatttattctttaaagaatctttacagggtcaaagaagaatgggtcctaactggctatgtgaactccccacagattctgaggatgatgtcagtatccctttccagatgtgtttaacactttgcagtcacttgtattcctgccactgagtgccagtgctttgctaatttgaactgattccagctcacgctgaccccagctccctggatgttaccattagccaagactgtcacccatactgtaccctttcaaagagtcctaaaaacagctcttcacctactcttccaagacaagtaaaaatgactgccaaagaaatggggaaaaaagattcagagagtgaaaacaattaatatactaacaagagagcaaaaagcaaagggggaggagaaactaggaaaatcatatatgggctctcacctatttccaaagctgggctaatgtccttttgcttgtgtctgaataaggcaccaattttaagctgctaatgaaa[144 bp omitted]tctactaaaaatacaaaaaattagccaggcatggtggcgcatgcctgtaaatccagctactaaggaggctgaggcaggagaattgcttgaacctggaaggcagagaatgtggtgacctgagatcacgtcattgccctcaagccacagcaatgagaacaaaattcggtaaaaacaaaacaaaacaaaacaaaaccaccataaaataactcagacttaattaaatacaaccctagtggtgaatgactaaaaatggattactcataacagagataacggtccaataagaatccaggaatcttaccttttaataacaaaaaaatcctttccttctaaagtaacatcctctcaaggccaggaattccattagtagaaagccttcctaaaaaacaaaattcctggccaggcatgggttcacgtctgtaatctcagcactctgggaggccgaggcgggaagatcacttgatatcaggagtcgaggcgggaagatcacttgacgtcaggagttcgagactggcccggccaacatggtgaaaccgcatctccactaaaaatacaaaaattagcctggtgtggtggtgggcacctgtaatcccagtgacttgggaggctaaggcaggagaatttcttgaacccaggaggcagaggttgcagtgaccagcaaggttgtgccattgcaccccagcctgggcgataagagtgaaaactccatctcaaaaaaaaaaaaaaaaaaaaaattcctttgggaaggccttctacataaaaatcttcaacatgagactggaaaaaagggtatgggatcatcaccggacctttggcttttacagctcgagctataagaacaaaaagaaaaagggatatcatttaaacacagtatgtagaaaagaataattattgaatctgtattggtctttaacttttacactttgatctttaattctgttattgtgattgagtccaaagaaaaacagtatgagtaaaataaaaagaacaccaaaaatgctaatattctgtttaccgaagtctgtagtgaaatatcccattaaatccaagtgcagtgacacatccataatcccaagcactttgggaggctgaggcgggtgaatctcctgaagtcaggagttcaaggccagcctggccaacatggtgaaaccccaactctactacaaatacaaaaattaggcaggcgtggtggcagaggcctgtaatcccagctacttaggaggctgaggcagggagaattgcttgaacccaggaggtgagcttgccatgagctgagatcataccactgcactccagcgtgggtgacagaacaaaacttcaacctccaaaaaaaaaaaaaaaaaaaaaaacagctagcaggtgacatttgctatagggagactagggatatgatcttgctgcaatccttccattttagtaaatctaaacaagtgtgaatccattctgtttcgtccccactccactccagagccaaaacaagaaaatcaattatatttctagttctttaaaaacatatctaactaaatcatctaattaaaagataatatgcatggttccatactctaaaagaaaacttatgtcctgcatatcatggacatttgatgaatgcttattcagttgactggtgtagacttcaataataacctgttcaatgcattatgccagatgaatcttgcatctcaaaagtagaacaaatattgttctttcagttttgtctacccataaatgcaatatttactaataaaaagaaaatgagtttattgttctagagagtatgagaattttgacaacatgaattctcctgtcctaggacataattaatacttagaggcatactatttcatgtggaagctaccattaaatcaatgttaagtgttaattacctcacataatcttctaatctgacttgactgaagacgtacctgacaaagttgatttatcaagttgtaaatcttcacctattgaattcataagttcatgtctgaaaggtgagaataaatacttaatattcactaggcaatattcagcaaagtaatatccactagtacacatttaatatttcatcatgaactgcgggtgtgaagagaaaagacaggctgggcacagtggctcacacctgtaatcccagcagtttgggaggccgaggcaggcagatcatgaggtcaggagttcgagaccagcctggccaacatggtaaaaccccgtctgtactaaaagtacaataattagctgggcatggtggcaggcacctgtaatcccagctactcgggaggctgaggcaggagaattgcctgaacccaggaggtggaggttgcagaaaccattatcacgccactgcattccagcctgggcaagagagcaagattctgtctccatcaatcaatcaataaaaatataaggaggaagcatttactgtgtatttatatgtctggtattatgtgaagcactttactatcttatcaaatcttcgggacagatcttcagttctcatgaccacaaaagaggatactaaagctcagacaggagaagagacgtggccagcctgtgtccccagggcctatggtcttaccactaggttacagtgtttccagataccacatgttgtgagatttttgccttaaaatgaaccaaaaaaaaaccaaaggtgaaaaaggcataagctattaaaaagtgggagaaacactaagagaaccttaagcatgtaactaaaaatattatggaaatgttattgaattcattagcaaatttagtgctaggttttcattgaggagtaggttatattactcatgatgaagaaaaatgttccttttaagtatattaacataaatgccatcaatattgtttatcatgtttaaatgttcacttaaagcaattcagttaaaattctgcatatcatacaattttatagtttgctagtaggttacaagtaaatagtcacccaaataaaaacatcatgttttccactggttgttgctcttttttaggtgagtatttgatgtataccaacagagagaggataataacaaatcgctaatttctttcatcactatataaaggtggcttcaggatagaatagtatcagggcaatgatgaatttgaaatctaacatcaattcagtgatgcatcaagataaaagcagagacaacaggggcaccttgctgagtactgaacattttatttatttacttatttattttgagatggagttttgctctttttgcccaggctagagtgcaatggtgccaacctcgcctcactgcaacctctgcctcctgggttcaagcgattctcctgccttggcctcccgaatagctgggattacagacatgcgccaccacacccgtctaattttgtatttttagtagagacggggtttctccatgttggtcaggctggtctcgaactcccgacctagatatctgcctgccttggcctcccaaagtgctgggattacaggtgtgagccaccgcgcccagatgaattccaaatttaacaaagcagactaagagaaacaattcatttaaaaaaataatatttggccaggcatggtggctcacacctataatcccagcactttgggaggctga[131 bp omitted]gaggcagagaactgcttgaacccgggaggcggaggttgcagtgagccgagatcgtgccactgcactccagcctgggcgacagagtgaggctccgtctcaaaaaaaataaataaataattcaatgaaattcctaagatccagggctttgcaataaatatgtaaataaatttccaatctccatactgaaagtttaaaagaaatgctaactaataactaaagaaatacaacttttcctcagctttgcagcaatctagaaacaaagtgtgtagacactacaaagcaccttacaaggagaaacatgtaaggatggcatgactcgccggcagccctgggcttgtccacggtacccccatgatgaacagtaactccactgtgtaaacgcccatgaacataagattacaagacttttccagtttagacataccatattttctttcagacaattcttcagtttgtttacgtagatcagcgatacgatgattccatttctctgaaaaccaagcaaaagttgcttctcaataacacgtccctatgtcagagcagcactaacgtataatgactgatgtcatatattttacattctaacagtccatatcattttactgctttcaagaaaaaatttccccttcttggtggttcttagaattggtttaatgggagactattagagaagctgaaaagcaggagggcagaaaagttcaatcaaattaaacacaataacagggaggtcacaatgaggcggtctccaggggtcttttagcaaacttcctaaaacatgtctcagctgtgtgaaataagactttacagcagccgggtgcagtggtgcaggcctgtaatcccagcactttggcagcagaggcaggcggatcactttgagctcagggcaacatagccaaaacccccctccctagccccacccccaccccgtccctaccaaaaatacaaaacagcagggcatggtggcgggcgcctgtagtcccagctactcaggaggctgaggcaggagaatcacctgaacccaggaggcagacattgcagtgagccaagatcacgccactgccagcctggatgacagagcaagactccacctcaaaaaaaacaaaaacaaaaacacaaggttaagagggacccccgaccttacagatacaagtttaagagggacccctaagcaaaaaatgccaaccctttttctcccaatcattgaaacaccaggagggtgtaacagttttgcagcctagctgtagcaggctgatgcccccaagatgcccatatcctaatcccgggaactggtgaacatgaccttatatggcaaaaggagctttgcagatataatgaagttaagggtctttggcttttggggttgatgtactcactcggatccttgtaagagcagagcaggtgatggagagggtgggaggtgtagtgacagaagcaggaaactccagtcattcgagacgggcagcacaggctgaggagtgcaggccacctctacggccaggaaacagattctcccgcagagcctcggaagctaccgaccctgctcccaccttgactcagtaggacttactgtagaattctggccttcagacctgtaagggaatacattttggttgttttaagtcactaagtgtgtggtaatttgttgcagcagccacaggaaactagta[131 bp omitted]gtgaaatgccatctatacaaaaaatacaaaaactagccgggcatggtggcacatgcctgtaatctcagctactcaggaggctgagacaggagaattgtttgaacccaggggggcagaggttgcagtgaactgagattccaccactgcactccagcctgggtgacagagcgacgctccatctcgaaaacaaaacaaaacaaaaaaaccccacctgaaggtttccagttctgccagcactctcccacccaacccccagaaacagacattccattgctgtgggccatggacaggcagaaggaagcacctcctcatggcagaggcctacccaggagaaacccaagggaaggcactgctgggctggccctctctgccaaggccatattctttttttttttttttttgaggccagtttcactctgtctcccagactggagtgcaggggcacaatctcggctcacttcgacctctgcctccccagttcaagtgattctcctgcctcagtctcctgagtagctgggatgacaggagtgtagcatgcctagctaatttttgtatttctagtagagatgcggttttgccatgttgcccaggctggactcgaactccttgcctcaagcagtccacctgtctcagccccgcaaagtgctggtattacaggagtgagccactgcacccagcatttgccaagacctttgatggcaggctttttccaggtgatcagtccttgtctggtctggctctgccccactctccttctcacctagttggaatccctagctacttttcagtagaggagagtgtgtaccccaatcccagcttggttcagatctgcatttaagtcatggaacctggctgctccccaggtcctgaagaaaaaaacggtctctctgtgggtatgataaaggatgggcctgtccccaggaccctgtgagagggaagcccaatgtcccaccaggttggcagggctggggaagggaaagtgttatggcagccccaagaaaaaaaagaggcagcagagggagcaggacagcgctcacatggaactcatgccactgcctgaggggagggaggagtgcacgccagtgacgtcagggggcagagaggcgcagttccagggcggctttccccctcacttcctgccatgttactctgatcgcctccaggtgagcctgcccactttgtgcccaggggcctgtagaaaaccacagctccccatggttatggccccaggagtggggcagagcagggaggagtcctggacagaggagaggaaggggcaggagggagtgggcctcaaactccaggagggggcccttctcatgggtcctgctttctggcttctccttccttacccctgggctgatcacttggggaagaactgagacaaagtttctcaccctcaggcccaaagggtttaattactgggcccttagggaggtgtgagccccctgaaaggatgcaaggtttggttttgttttgttttttgagacagagtttcgctcctgtcgcccaggctggagtgcaatggcgtgatctcaccacactacaacctgcgcctcccaggttcaagtgattctcctgcctcagcctctggagtagctgggattacaggtggctgccaccacgcctggctaattttttgtatttttagtagagacagggtttcgccatgttgggcaggctggtcttgaactcctgacctcaggtgatccgactggctccgcctcccaaagttctgggatcacatcagccactgtgcttggccacgatgaaaggttttgtgtggagagcatgtacatgcctttctgggaaaacagtccacagctcttattctcagcaggcttcacggtgaaaaaaggttagaactcttgctacagagctgtggaagcagccaggtgaggggcctgccaagggcactctgggcactacctgggcactctcgagcccatcatcccctaggcaggctgcactgcttggtatttgcagagctgagggggtggggcatgtggggactgtgaaatcgccctgagatgacccacagtcctcagctgggaagtgagcgctgcatctcctgcagcgtcctccatccctacagccatggggccaggagaaccggcccttgcagcaagtgagaagcctattattgattccctccctagccatgtagacagtgaaccaagacactcatatcaggtaaatgccttgttctctgttaccaaggtaaccagtaggcattcccagatacagcgaaggtcctcacaccaagatatgcacctggccacctgaggaaagagaaaggactatctgaggggatggggctgagctgggtgtggagtggtccttgtgggtcttggagagtgggagggggagcagcatgagccaggcctcaaggcagaaggacaaccaggagacagcctggaaaaagtgctggacccacaagggctctaggctggccagaggggaggtgggataggctgtaaagtcctgaggtctgaagattggccctggcaggaagaaaccaggtaaggtggggtgttacctacaccctcggggccagatgcaggccagagccagccaattaccaggcccttagggaggtgtgagccccttgaaatgatgcaaggttttttgtttttgttttggagacggagtttcgctcttgtcacacaggctggcacctttgcccagagcaggcaccaagacttcttgctctgggtgtgacctcagtctgggtaaaagccccagcccccaccagcaccacctaccccctagactacttcaggtgctgagcccaagccaggggcaggaagctaaactgatgcctagggtaatcccaacaaagtccctggttccccgcagctatggggctgatggggaattacagcccaaaccccagatgctggctctcaaactaacactgagccctcagtgcccacagggagatacaatcagcacactttccagatggggaaatgggatcagagaagtgcaacagccttgcccaatgccccagaccagggctccaggcccagagtgttcttttgtcactgtgttcagagggcagcagctgctgtgatgtacccacctgagcctggcagctttctccaactttggaagcccaggagcatggcccctgtccacagatgcacctggcacgaggcgtgcccagagggacagaggcagatgagttgcgtctcctccactggattgtgagggcctagaaggagacaagggtctgcttgagaaggcagtgaacagcgagcagcctgaggcagtgcccctctggatggatgtgcagtgcctggatggaacctggctcagacagagctcagttctgcaggtccctgaggcatggagagttcacagctaccaagtgtaggagtctggattcaaagccaacggcgtcactccaaagtccctgccctagcccctggaccacccttgcaggcccatcagatgctcaggccagcagcacagccggccaagaccagggaaacttggggagcctcagagcacccccaggtattccaacctaaccctggtgccccgcctctcaccgcccttcttcctgcttaacctcaacccctacacaaagcctgggccacttcatgtggcatcaaacagacgcctcaataaatcagtctaatctcgaaaaaaaaaagacttaacagatatacaattgcacgttaaaatgctaaagaccataaacatataacaacttaaagtacatataaattcaatatatatccaatcattgtaactatgacacggtagaatattaaaatactattttcaaaatgtatacaagcttaatgttctatgtattcaaactatttattcaaaatacaaatcatcaacataaattgccactaatattcagtcccttcacaggacatgattcactgggagttaataaattagcagctggcaggcagtgacacaccgcaaaaatgaaaaccaagaggtgaaatagttctgaaataaaggttttaaagctaacagaaatcactgaattactaagtcattagcactaattttgagccaactaactaattaatatgagatgatacaatgtcctatactttggtaaatacagactatgtttaaacaatgtctgtaacgtgacttgtaaaatgctcctggctttacaaagatgtgattaagatgtagtaacacatgctaaaccatttccccctgcagagcatgtggtaactttcatcagtcacattgagagtccagaagataaaggaaaaggtcatggattttgctgagaacttaccagagttgaactccctcattttccgttccccagcattggcgggttctgggactggtggctgtggcggctcgttggtctttgtctcttagaaggtggggaataatcatcatcttgaaaaagaaaaaatggtcattactgaaggaaccatcttaggttacagccacctctgggtcaattcccaacattcaaaagctgagcagggctttaaagctatcttattaataattatttctgtattgcgaacttcagcatacttttttctagttacatttgaaatgttattcttttgggatgtgctcaagtgagtactgctttttcctctgccttgcttcattactttttagtttccttcatttgaatcatcattgtaagtctccccttctcctcaaataactttcaaattgctgccaagaactatgttctatcttaaggcttttgagaaaaaactttcaatgaagatagccgcctaaagttatacaaatatagaagaaacgggataaaataaagcttagattggaaaaaatatttaagattctacaaaattcacgcgtaaacaagggaagctgagtaattgtatgttcaaatacttttaacaagtgcaaaacatgtaggcttaaagaaatagagctggccaggcatggtggttcacgcctgtaattccaacagtttgggaggccgaggcaggcagataacttgaggtcaggaattcgagaccagcctggccaacagagtgaaaccctctctctactaaaaatacaaaaattaggccaggagtgatggctcatgcctgtgatcccagcactttgaaaggccgaggcgggtagatcacctgaggtcaggagtttgagaccagcctaaccaacatagggaaaccccgtctctactaaaactacaacattagccgggtgtggtggcacatgcctgtaatcccagctactcagaaggctgaggcaggagaatcccttgaacccaaaaggcaaagattgtggtgagccgagattgtgccattgcactccagcctgggcaaaaacagcgaaactccgtctcaaaaaaaaaaaaaaaagaaaaaattagccaggagtggtggcgcatgcctgtaatcccagctacttgggaggctgaggcaggagaatcgcttgaacccaggaggctgaagttgcggtgagctgagaccgcaccattgcacgccagcctgggtagcagagcaagaccctgtctcaaaaaaaaaaaaaaaaaaaaaaagagagagagaaagaaagagggctacattatttatgaaacagatactgttaactcagtcaccagaaagcctgtgtataaatgagcagtgagatattcaagcacagcacacacacacttctcaggacagctgtcgtgagagttccatgctcatttccttctgggtacatcagcaactcactctgctatgatcctgcaatacatctcatgttagaattagagacatctgggccaggcacagtggctgacgcctgtaatcctaacactttgggaagccgaggcaggcagatcacctaagttcaggagttcgagaccagcctagccaacatggtgaaatgctgtctctaccaaaaatacaaaaaattagctgggtatggtggcgcacgcctgtaatcccagctactcgggagcctgaggcaggagaatcgcttgaacccgggaggtggaggttgcagtgagccgagatcgtgccactgcactccagcatgggggacggagaaaggctctgtcaaaaaaaaaaaaaaaaaaacagaaaaagaaaaagaaaaagaaaaaagaattagagacatctggatcaaatcagctgccagtctcgcaaagtgtcgggtaatatcctattaagattgctgcttacacatcatctataaaatactgaaaatatcattttaagaaatcttttttttattttgagacagagttttgctcgttgcccaggctggagtgcaatggtgcgatctcagctcactgcaatctctgccccctgggttcaagcaattctccttcctcagcctcctgagtagctgggattacaggcatgcaccaccacgcctggctaattttgtattttcagttgagacagggtttctccatattggtcaggctggtctcgaactcctgacctcaggtgatccactgaccttggcctcccaaagtgctgggattacaggtgtgagccaccatgcctagccaagaaacccttattttaaaacaagccaggcgcggtggctcatgcctataatcccagcactttgggaagccaaggcgggtggatcacttgatgtcagtagtttgagaccagcctgggcaacatgttgtaaccccatctctactaaaaatatattttaaaaattagctgggcatggtggtgggcacctgtaatcccagcttctcaggaggctgaggcaggagaaccacttgaacctgggaggtggaggttgcagtgaacggagatcacgccactgcactctagcctgggtgacaatagaaagactccatctcaaaaacaaaacaaaacaaaacaaaacaaaaaaccactaaaaaaaagactccatttcaaaaacaaaactaaaaccaaaaacacaacacaaatgtagtacacaaatgaaaataattactgtgttaaacacagcttcatagaaaataaaagaccaatcaaatacaataagctgcctttttagatgggtatgttattcttctttcacagctaaagaaacaggctcagagaatgttatttgattggaccgtgttgcatttctggacagtgcagctgagatcagactttgtgtgtaactccactagcctaccagggtgcctctcatgaaggtaagaaatgtaaatctggcctaatatacaaagttgccagggcagcactgggtcaattctacatacagtacttctatgttcatcaagggaaatcttaagggaaagtgaaaatgcttctagaaggcgactggacaccagcgcctttgcttgttgcctttgggctcttcttctaaggccaacagtgacctgaaattattgactggcttttccaatcaagtggacaaaatggtaccaaggtcgccaacatcgatgtagaacatcgatgttctacaacattgcttaacgcaaggggagacgctcctgactcagagtgtttaattgctcacctacttctttttctgccctcttgggcttctgaaatgaaaagaaccctggggtgatacagtgagtcaaaggggtgccagccgcatcacagcaaaacagattcctaaaaaatccctggcctaagatgacagccttggctggatcagtttgaatgtgctgatagtggacatggtagaatgaaggtggttgaaatgttcatattaaagaacttccacccagattgcaagaaaagagagaggaatggagatggcagcacgagcccctacaataaaagcagatgttttgagatcagttatatttcttctgacaaaaattaaagatagaaaccaaagtttagcctgagactacaattaattgggcaataagccagaggcacatatggcatagacagatttaaacatttctccctgatattaatacaaacactaaaattacaaatgcatggattccaaataaaacaaatatttaaaaaatttaatgaataaacactggggtctacagtagtatttgaaggagatctcacaaacaggtttggtttttgaaggttagaactggtggtctagagaattcatttcattccagagaaagaaagagaggaatttcttgggttccttcaggaatgcatctagctttgcctcatctttgtttgaactatggatacggcagaagaaaacatgaggatttcacagatttaaggtacaaaaagtcactgggttctctaagaagtctgggattcttctgctggaaaaataagtttgttgagaaaaaatgagttggaggaagctgttattgaagtcaagcagaattgtttttactaatctgcttattacccactctgtagtgtggaaacaaattattcatgcacaaggtcctcttactgttcctagaatgcagtggaaagagaacagattagttttcctccctcagaacacaatccctagaaacaacctacctcagatgagatattgcctaattattttcaaaagacagtgaaacatcatggatgtaaatgtttgctgcaaaataaatacatgctagaaacagaagcatctgggtcacagctatattagagctacctgtgttcccctgtcactgacattaaaacaaaaatgtccaatacaatcattcacagcgtgggagaggggaagttgaaggatggaaaggccaggcataaaaggatttcagaatttccgtccataaggaagtagctttgtgcactgtctgttactgtgtgcaaggtgaaatttgaagaatgaaaacgtgcagtaacaagggctcctttgtccaactcacctctccagataccaagtttcagacatgttgcattttaattgaaaggttgatataattttttttaaagaacacttgcggtgtttgaagtgacaaaggctgctgtgacaaaaaagcagggaaagggaatttttttttaaaagcaaacaacaacaacaaaaaccccacagaaaagcaaacaacaaacaaacaaaaaacagaggaagaagtcgaacaccctgggctgtgactacttccaggaaggggctacaagaggcagttggaaattctatttgttttgcaactgtgggttttccggcccgcttcctttctaaagtatattactctgcttttggttcatgaagttatccatttctgttttctggaacagctatgtattttctttatctatcatctatctatctatttaccatctatcttttctacctttcgctatcaagagcttgggtcaagcaggatagaattccagtgtatgttcactctaccatttaaaacaagagctcttgtaggcattctccatcacatcataaacctgagctttctaaaacagggtgtggcaaactaccatgcatggaccatgtctgacacagtctgcgtttgtaagtaaagttgtaatgggacacagccaatacatgtgttacataatgtctctggctattttcatggtataatggaagagctgagtcattgagagagagaccatatggcttggaaaacttaaaatatttaacatttagccccttgcagaaaatacttgctgactcttgtttaaaagatctctgtttagaatgctacctattgagttctggatagaatcacaactctttaccacaatcaacaccgcttcagccctgcttctatatccagcctcatctatttctgctcctcctcattttccttctggccatgctgatggattgtcagcttcccagatgtgtgagaatctctcctcccttcctaacattctcatgctctccctctgcctctcaagaacttcctgccccatctctcatgacaaatcctttctacattctttaagatgcagcccttttgctccttccttaaggatgtcttgtctggctctattttgggtgacgtgctccttctgcatctcccagagccagcctgtgtgtgtcagctacaacatttctttgcatctctgtgtcatatatcaccaaatctgcctaagcttgcatgagtcactgcatgacaacttcagactccaccagcattgtccccactaaccacaaggcttagacattcgtccagtatgctcggggttgtggggtggtagcagtaactggctggtgaccatcatttcttacatcagaatcaaatctgtagatctctgccattcataagtatttggagtttaaaattagcataaagattttccttaaaataagaagaaaggccttgagtaggcttttggaacataggatgtttccactggttcatttctgtgttcaatattcccacatgaatctgaacacgactctgctcttagtagctatgtgaccctgggaaagtcactcaatctccctcagctaaattttgttgtgtgagtaatgaggagagagttgtgatttgtatttagtgaataataacaaacaaaaggcatttagctttctggaacctggtatgtagtagaacctcatgaaatactagctctgttgataaaactagactgaaagaagctttcaaagtcaacaacagtttgaggcagtgaaggacgtagaggagaagctgctgctgcagtctgtagctcctggaagcccgttttgtccatgatttagcaggaatgcattacccttccatgaggaggcacagcccacagaaaccaaggccattctttgaagaaaaacatgtcttaatagggtttacattatgtaacagtgtaatacaaataataatttattattagtaataatataaaattatttacagtaccgtaaccctaactctaacccctaatcctaaccctaacccctaaccctaatcctaacccaaaccctaaccctaacccaaccctaaccctaacccaaccctaacccaaacctgaccctagcccctaaacctaaccctaacccctaactcctaaccctaacccctaaccctaaccctaaccttaacccctaacccctatccctaaccctaacccctaaccccataaccccaaccctaaacccaaccccaaccccaacccctgaccctgaccctgaccctgaccccgacccctaaccctaaaccctaacccctaaccctaaccctacccctagcccgaacccgaaccctaaccctaacccctaaccctaacccctaaccctaaccctactccaaccccaaccccaaccctaacccctaacccctaatcccctaaccctaacccctaacccctaaccctcaccctaaccctaaaccacatgagcaatgtgggtgttatattttgggtgtcatgtgtgccttaggaatgctgcatttgtattccaacgctgcaactggaccctgcaatgcagcccctcgccttgccttgggagaatctcggtgcgcaggattcagaggggcttttggtttcccgttttccacactgaaccgttctaactggtctctgcccttgattattcacggctgcaaccgggaaagatttaattcaccgtcgatgcggccccgagttgtcccaaagccaggcagtgcccccaacgtctgtgcttaggagaatgctgctccacctttacggtgtcccccaggtctgtgctaagcagaacgcagctccgccctcgcggtgccctcagcccgcccgcccgggtctgacctgaggagaactctgctccgccttcgcagtaccactgaaatctgtgcagatgagaacgcagctccgccctcgcgatgctctccgcgtctgtgctgaggagaacccaactccgctctcgcaaaggcacggcgcgccggcgccggcgcaggcaggcgcggcgcgcccgcgcaggcgctgttcgggagacgcggcgcagggcatagacgcacgcctccgcgtccccggaggggaggggtctctgggcgggcgggagtgaggcgcggcgcaggtgcaggcgcagagacgcacgtcgctgggctcagggtggcggggcgtgttgcaggtgtacagtcgcacgccgctgggcggggagcgcgggaatggcgaggtgcaggcgcagacacacgtccccggcggcgcggcgcacagacgggtggaacctgagtaatctgaaaagcccggttcgggtgccccctgcttgtacccgggcactacaggacccgcttgcccacggtgctgtgccattgcgccccctgctggcgactagggcaactgcagggccctcttccttacagtggtgtccagcgccccctgccggtgccggggcacggcagggctctcttgctcgcagtatactggcggcacgccgcctgctggcagctagggacattgcagggccctcttgctcacattgtagtggcagcacacccgcctgctggcagctggggacactgctgggccctcttgcttgcagtgtagtcggggcatgccctcttctgtccgctgggggcactacaggatcctcttgctcacagtgtagtggcagcacgccccctgctggcaaccagggcacttcacggtcctcttgctcatggtgtggtgcccctacgccacctcctggcagctaaggacactgcagggccctcttgctcacagtgtagtcgtcgttcgccccctgctggcagctagggacactgccgggccctcttgctgacactgtcgtggctgcacgccacctgcaggcagatggggactaggcagggccctcttgctcccggtgtgacggctggcgtcccctactggccgcctcctgcaccacttaaagtcagagcgccagttattaatccccatcagttctgtaaattaaaactgaaaaggagctattactggggagagctgatgtcccagttattaacttggaagaaagattttcaccaagaggcagtacaaagatggaagataacttcattgaaaagaaatacagtgtaaagagcttattgtaggaaaatagggaggagtgggttcatagtgcatgaaaacagcctaagagtcctgtgcagggaattttattttggacttcttcacattcctgcctctgtctcaagtctatgcttgttttccttggttttcctgctactgccttaggtccctgacttgccccacttaggcttgtgggacctcctgttgattgaggtacacgtggggtgatgaatctgaatccactctggcaccaacctccttcctgccatcccaggcaggctgacagcagtcacgtttgtatctactgcacctgcctcttttgaatgtctttctctgccctaatctgtacttatggtgccaggtttctcttaggaatgtcccctttgtccttcttatcagcatgtagctagcaatattctgacatttttattgcagagtgaatgatgattggggcatcttaagagaagttctagggtgtttctgcgtaggtacctcttctccctcctaaccacaattgacaagtgcccatcctctccagcactggagatgctactaatatgtgcatttttggtggtccctccaggtgagccttcacagactttcccttttccaggagctccccctcctgttcatgtctagctagctatctactctaacagagcccactatcctgtgtctttcccaaaaatagtgagggaattattaattggaaaccataagaaatcatatgcatgtagatgaaaactttacaacttacacaaataatcactcaaaatcatccttacactaaaaaagcaaaactatacaatttctagaagaaactatagaagaaaagctatgtgcctttgcgtttggtaatgaattttaacaaatgacacagaaggttgatatacacagaagaaatgacaatgtggatttcttaatatttacagtttatactctggaagagaccttgttaagagaaccaaaagacaagccacatattgaagaaaatatttgcaaaatacagatctgagaatttgtattcaaaatacataaaaaattgttaaaactaaacaataagttaaacagcccaattaaaaatgcacacagatctgaacagacgcctcaccaaagaagatctacagatggcaagtacacttacaaaaagatgctcaacatactagagaactaaaaaccacaaaaagatagcacagctggtctatatctcttagaactgctaaactctttaacaaatgacaaattgctggaggaaaaacaagaactcttttcattgccggtggaacacagtgtataagaccaaaatatgccaccccaaaatataatggtaggaaaccagaatatgcaaccccaaaatatgtccctttggcttaagaattattccaagctaattattttgaaaaaaaaaaacgctaacaaaggaagttgtgaaaacagagtagaagttacacttgtgtaaggaaaatttacatctataaaggaaatcaccatttaaaagctacctctctcgacaccaagaagagaaggataactaaatcactaaagagtcttatcaatggagaatgcatggacttaagtctgtataacgaaccttacccttgtctaatgtgcttttgctggttaactccccaatactgcacctcaaatcttctttctttaagttgaagacagtacttatgcttgaattgaaagccacctgttggagatttactcatttttccctgagtatctcccatgtaaccataaggtatacgtgtttttctacttttctgtttttctcattttaatctgtcagtttttacagagcatcccatctaagaattctgaaaacagaaaattatttttcctcccctattacaagttgggcatttttttccaaagctaaacaagtctcaccttacaatccaaaaataacattcctaagtattttgacaactactttgatgttatttccaatcaaaagctaccatgcaattatttacataagccctattcataatgaccaaaggaaaaaaacggaatcagaaagtcttacaatagatgactgtgtgggaatccactcagacatcaaaagttgttataaagattatttaaatgaaaacatttgagatactgaagataaaagaagaaatcttaccacaacttactttgtccaattaaagcagagctcccagaaaaatacagctgccattaaccccatccaaggagtttcttgcaaattcagctgccatgaagacagcgtactctttcgcattagcattgataaacaaaaattaaattataagctcccaactgactgaacagaaccactcttggctgaggggaccacagagtaactttcaaaactgagttctcagctttgctaggatgggatgatggggttaacatacacatcgttaaacccactcctttgctaaccatgatgaggctttcttccctaaggatttaacagaaaccagccctttcaaagcctccactactgatatcaacctctcctttcttgcctgataagagaccacccacaacagagaggttctggccagcgtacagaggatgcacagagcgagttttcatgtcctctgcttcaccttttaatgtcagagggctgaaaactccaccctgggatcatgctaacactgccattttttgtacatgggacccatgaagaagccagaaactcaattgtgcatgcatgcatttctccttccataaatattcatgactcctcctggagcttattaaataaatgtatttggccattccagtcagcataaattgctatttcctttacctcctccttgaagagtctgtttctggcttctggctggaggctatgcttcccagcctgtcagaaggacaaccctgcaggctacaaccctttataggaaataaatctctcactggttgggtggctcatgcctgcaatcccagcactttgggaggctaaggcgagtggatcacctgaggtcacgagtttcagaccagcctggccaacatgatgaaaccctgtctctactaaaactgcaaaaaattagccaggtgtggtggtgggcatctgtaatcccagctaatcaggaggctgaggcaggagaatcgcttgaacccaggaggcggaggttgcagtgagccaagatcacgccattgcactccagcctgggcaacaagagtgaaactctgtctcaaaaaaaataaaaataaacataaaaatgaagaaatgtctcctttccaaatttatgaacctcatcattcttccgttgacagcattaaaaggttcaaaaagacctttccatactctcccacagaagccctagaaattgtcattttgttcatcattctggatgcctgagaacttgtaatccaatgagtagaaagtttggtaccccatttatggctgtcaacctgccagttctcaggagtttgtaaaagcctaaatccgaaaggatctcatcccattaggacccttgtctccttttctgttgcctttgcccactggctctggcaacaggggtctttctttctccttggctatctttggatatgggggctccgtcttctgtgccaccttagggaatgccttttgcatgcatggctaagtcattaaaaagcctacagtttcagtaacattttgagtgagtactctctgaagctgcgttggaatctcaggcttctttgtctggaagataactcttgggctacaagtttcttatcctagctttggttttgaggcctctctgttctcctcttgggttggaagttattcctggctttttgtttcaaggtgtctctgtgatcttgaacttgctcctttcatgagaacttctcagttgactaaattctcccttctcaaacctctgctatgtgttccaccaatatggaactaattctacttcctttcctgtttacatgattttactaagaattatttagaaatttaattgctcctttgagaaaatttttatcttccaaattgcctccttttagacttttcctttcccagttgagtctctcaactccctgtaatcactgaaactttaggcaccccactccatgccttggaggctctcaatgtgctcaagaatctgcaaaagcaaacacctggggctgaaaaataaaatagaaaaaaaaaatatttctcatcctccataagattgtatgtgaaaacaaaagaaaaccttaaaaatctccaaaaatattggtgagaaaaaagccttagccctcatatgaagaagaaaaaacttgttccattttccagttacacagttataatacaaatataaaatgaggcaaagacaaaaaccaagtcttctatataaactagtgaattttgtagtattgcaatcacattagtcagggttctccagaaggcagaatcaataggatatatgtagatagatgagagaagattcattaggggaattggttcacataattatggaggctgagaagttccacaatagcctgtctccaagttggagaaccaggaaagctggtagcgtggctcactccagatacaaaggactcagaatcagggaagccaatagtgtaactctgattctgaggccaaaggtctgagaccctgaagttctgatgtcaagggcaggagaagaaggatgtttccatttcagaaggagataattcacctttcctcttccttgttgttttatctgggctctcaaccaattggatggtgcctgtattcatccatttttatacagctatgaagaaatacctgagtctgagcaatttataaagaacaaagaggttgaatgggctgacagttccacatggctgcagggccctcacaatcatggcagaaggggaagcaaagctgtccttcttcacaaggcagcaacaaggagaagtgctgagccaaaggggaaaagccccttataaaaccatgagatcgtgagaactcactcactgtcatgggaacagcatggcagtaaccaccaccatgattcagtcacctcccactgggtccctcccacgacatgtagggattataggaactacaattcaagatgagatctgggtggggacacagccaaaccctatcagtgcccatccacactggatcatgcttatctcagtgtcttccagaaacaccctcacagatatgcccagcaattgtgtttgaccagctgtgtgtgtctctcaatccagccaagtagatgtctacaattaaccatcagaatatttatgctagattcatggctgaaattgtgtttgaccagctatgtgtgtctcttaatccagtcaagtagatgtctaaaattaaccatcagaatatttatgcctgattcatggctgaaatcgtgtttgaccagctgtgtgtgtccttaatccgatcaagtagatgtctaaaattaaccatcagaatatttatgcctgattcatggctgaaatcgtgtttgaccagctgtgtgtgtctctcaatccagtcaagtagatgtctaaaattaaccatcagaatatttatgcctgattcatggctgaaatcgtgtttgaccagctatgtgtgtctcttaatccgatcaagtggatgtctaaaattaaccatcagaatatttatgcctgattcatggctgaaatttcaggatgaaagctatgaaatctctatttctgtttgtacatctattaatgtatgttatgtatatgtgatattttcttaactccggagagcattgcaaaattcatttataaaatcctctaaaagtgctctattctaacttggcttggaaaaaaataagcatttataaataaatattcaccaaactcctagaaatataggaactgatcaaatgttttttaagttaacacgatttggataaaacttagttaaataagattaatataatatttttggggtagccattgtgggttatcagattctagtcttgtttcttgtttctgggctatttttacctctttgtaaactggatcctgccatctgatgaattttgtcccacaatgatacttgggcaacaagaagccaagtattttctctcctagtaatgtatctattgtcatttaatttgaaggtcttcaaccctggaacaaagttagaagaggaaggttttgatccccaaaatgcataaccaaattgtggtacattcatgcaatggaatgctatttagccatagaaaggaacaagatatcaacacacacaaagacatgagtgaatcttgcatgcacattgctaggtggcagaagacagtctgaggaggatacacacagtgtgacctcatttaatgagacactggagaaggcaaactacacagatgggaagccattggctccatagggtggaggtttgaggcattccatatgatactttaatagtgggatacctgccacaatgcatttgtcgaaatacgcagaattttacggccaaatggttaaagcaaactctattcaaattacataaaattactcaggatgtggagtatcccacgacagaatacatcatgtgaaaaagaatttatgctacaaattactatggtttggatgtggtttgtccccgcaaaaactcatgttgaaatttgacccccactgtggcagtgtggggcggtggggcctagtggatggtgtttgggtcgtggggacggatccctcatgaatagattaatgtcctccatggggtaagtgaattccattctcacaggaatagataattcctgcaggagtaggtaattaaaaagagtctggcttccttggcttccctcttgctttcacttttgctatgtgatctctggtgcaccccttgctccccttccactttccaccatgaggtgaaaaagactgaggccccatcagatgcaactgcccaatctgagacattccagccaccagtattgtgagccaaatgaaccttttttacttaaacatcagaatatttatgcctacgcataatattcagaatacgcagcctcaggtattctgttacagaagcacaaaatggactaagacacaaatgtaggtaaaaactcactgaaggtgtagagaaaatggtgttgacctaagtcactttgaaaatgaatagaatctgtaggctgaaggcaagtgaactatacttcatcattggattccattttataaagttctttccaacagaagcaattgtgaacaattgtaaaaccacagtgtctgtatctggaataaaacaatgacttacataagtcgcagatggtgggaaccagctttctcactgttgaagtgggaggttacaaattagcaaggtgagaagactagaatgattcatgtaatagtagatcagaggtggagacatcaatgtaaacttatgtttagtttaatatagatgcacagttctacatagaaaactttgtaattaggtgtgtaaaggtaggttagacacacacatatacttcctagcattgccaataagggagaagatacaatgtgctcattcagcagccagatgtaagttttcctaccattctgaaaggaatctgactctttgaagaaatgtctgatactagaactgggacagtaaatataggagccaggataatctggaaggatcagaaagtaagtaagtactaaaaaaattaaaatatatcaaagaaaaataagagccaataaaaacagctactgatggccaacacaggaatgaattgtgcaacataatactgtagtgttgaataataactaaagcttaaagtaattatctaggtgtctgtatttgtatacataggtgaataagcaaatggagttgcatagaaatctcctttgcaaaagaattccaaataattgatgtagacactcagccatcaagaaagtggagccaactcctcactctgtaagtgtgggctctgcatagtgacttgctccaaaagaacacatgcagtatggacaaggaggagaaataacctcacagtggagaaatctgacaaacagtagctctgccaaacgatccaagttaacatcaaagctgacagttcaccttgagaacatgaagtgacaatggggggcattctacaaaatgcctgacccatcctcctcagtactatcaaggtcacctgagatggaaagcctgacacactgtcacagccaggaagagcccacgtgatgactacatgtcatgcgggatcctggatgggatcctgggtcagagtaagacagaactaagggagtccaaatgaaatatgaactttagttaataatagtctcagtattggttcattaactgtgacaaattatgtaagatattaataagccatgtgagacacactgatagaagatgttaataagagaggaaactaggttgcggctacatgggaaatctctgcttttttttgacaatttctgtgtaagtaaaaaaaatgatgtaaaataaaactttatttaaaacactgttttttttgaacacttccttgtttaattatttataccatgaattactagtaattgacactgttaactagtcctgtttttttaaataagagtatttatgacacaaaaaattaaacagtgcagactgatacataaatcaaatgttctttacatgttttctgttgcagtagtaacacacatgtgtaaacttaattatcacatgtttttcttgtgctgtggttgtgtcctgggttcattctctaaaatgctgttcatcttagaccaggaaaaatattaaccttacagactctgtttcaattcatagctaaatattttcaaaagagtgactttgtaaaaatatgttccaatggcaaattgattcattgtgatgggatcacttattccaaagacttcctgtctttattttgttgccatgcctaccttttagccatgatacaacagaatcaaatattggccactgggaaaaaatattcaaagaaagaaagaatgtgaacagaacttatgaccatgatgattcaatgttttaccacaatgctttctaaaacagaagagtgtaaaaggatattcaaagtcaatttcctcactgaggctttgcagaaaatgaggaaactagagaaacaaaaatggcgggacattctacgggtgattttaaatgttgctatgttttatgggaaaaaatactttaccttttaaagaatcacaaagaattgttggaaacccaaactctggaatgtttgcaaatttagttgagcttctatgtaattatgtctatataggtagccacaaagttgatgatttttaaaaatctgtgccttatttgtgtaataaaatacacaatgaataattaatgttcctaggaaaaccttatgaagggaaaataaatcttggggaatcaaaatcactaagctaaaaggaaaagtcaagctgggaactgcttagagcaaacccgcctcccattctatccaaagtcacccatctgctcactgagataaatgcatatctgattgcctcatgtggagagggtaatcagcaaagcaaaagaatgaaaccatttgtctcttacctacctatgacctggaagccccctgtctgtccttctcacctttctggactgaaccaatgtacatctttcacatattgattgatgtctcatgtctccctaaagtctataaaaccaagctgtgccccgaccacgttgggcccatgttgtcaggacctcctgaggatgcatcatgggtgcacatcctcaagcttggcaaaataaactttctaataaatctgagagctgtctcagattttcagggttcacacatgtaatgtaggatgtcaatgtttataaaacagacattattctatctactattagaaatatgctaccaattaaccttagactttctcaacaaaataaaaaatgttgatgaggtacaaataatatactaagcttaaatagtgttgcaagttttaatatgcaacactatttattaacatttattaaaatgttaataaaattaacatttttcaatactatttttactaatttaacactgtaagaaaagtgaataattaaaacatgaataaaagggtttacaaggggtgcacatgtttcctccagtctctgcctatccccagctttcatcccaactgtcttgatggtggctctaagcatttctcctttctctatgccaagatctctcccagaaacaaacccaaatcttactatatattatggcacgttatgatgatgagcagtgatgagcagccgaagcctcaaggaagggatgcttttgtaaaacaagacttgtagaatataacgtgtgaaagtaaagcacatggcagagctccctcctcagcacacgcggagcagacaggaagcttttgcctcaccttcctcaatggcctgcagccacgtctcccaggtcagtcttaaggacaacgaaactctggtcttcactgtggacacgccacactaccaggtgctccaaagccatggtgactcaccctcgggtgggtcctgagcacaacaaagctctggttctaatcctaaccctaaccctgtcccaagactttgaccctgaaccgaaatcctgatccctaccctggtccctaattctgacccttactttgaccctgactttgatcttgaccctggccatgaccccacctctaaccatacttccggccctgactctgacccagatcctaatcctatgcctaaccctattattatctttacaatctaactctaatcttaccctctagtgctaaatagctgtacccaaaagcacttttaaattatttaacttcttttcttgaattctctatggacatcctaaaggagacgtcattatgtattttgcattccctctgagtagtatggcttcagatatgaagttgtaatactttgcaagacataaaaagtttggagggtaacagcactgggttgttagggatgcatgttggcattcatgatagtcattggtgctgttctccaaatattttcagttcattttttatgaacgcattctgactgttccatcccacccacttaaattttcccatggctacatgactttttttttttttttttttttttttttttttttgccgatggaggtgagaagaaataacatgtgactttttcaggagaaatctccaagaaacagcgttctattccgcatgcttttttctcttttctatagcaatggggatcttattgatggtccctccttccttctggattcctgtgttaggatgacacagcacagagctacctctcacctgacccgtgatgagatgtaaataaatgaggaagaagatttttgagccactgaaatttggaggttgtttgtcaccacagtttaagctagcccccactgactgatgcacggctgaagaatgagtccgaactggctctggacaagacatgtgaagagcgctccaggctgagtaaaattcaagggttgcctcaaagataacactgagcacgatatgttattggggtgggtgtgggataaataaggtacatcaggtgagaataacaagaaactcaactttaaaagacggcgctgatttgcactgtggagagattcaaatgccctgcttagcatttgagattgtgatggatgaacaaactaattaagagcccaaaatgaaagctggggataaatatctgaaggtgtctaatatcccagtttttcatcctagaatgggcagagtccttgaccccattctagggagatttccaaaagaaaaaagacctgcatttcttcagcaacccacactgagagactttcctgcacttttgacctgtggctaacactcctcacctttcattctgtcatcagtgttttggggaagcacctttaactctctatgatttacaggttattcctaacctgtaacaggttacaggttacaggttattatgtaacaggttacagagcaagacgccgtctcaaaaaaaaaaaaagagagacaacactattcttaataacctatataaacaaacactaagcccagatgcagtggctcaggcctgtaatcccagcactttgggaggccaaggcgggcggatcacttgaggccagcagtttgaaaccagcctggccaacatggtaaaacccagtctctgctaaaaatacaaaaaattagccgggcatggtgacacacacctgtaattccagctacttgggaaactgacgtaggagaacccttgaacccaggaagcacaggttgcagtgagccaagatcatgccattgagacgagagtgaaactctctcaaaaaaaatttttttaatttaaaacaggtgcgttccttctcctgctttctgaggacgccctgctctgtaactgaatagtcgctaataaactctcttaccttcactatactctgtgacttgccataaattctttcccatgtgagatccaaaaacccactctcggggtctgggacaagactccttttctggtgacaaaattattcaaattctagaagaaaacatagaaagaaagctatgtgacattggatttggtcatgagttttaacacatgacactctcagaggcatttgaaccacagtgaatccatcttgattaagggctgggtaaaataaggatgagacctgctgggctgcgttccgaggaggttaagtgttcttaatcacaggatgagataggaggtcagcacatgatgtaggtcacaaagaccctgctgataaaacaggatatgggaaaaaaaaaaagtccaaaaccaagatggagatgaaagtgacctctagctgtcctcactgctcactatacactaataatatattagtgtaaccatccaagaggttcaccttgccctctacctacatgctggacagccaggcacggtggttcgcgcctgtaatctcagcactttgggaggccgaggtgggaggatcacctaaggccaggagctccagaccagccaggacaacatggcgaaacccctatctctactaaaataaaaaaataaaaaaattagtcggatgtggtggcgggtgcctgtaatcccaactactcgggaggctgaggcaagagaatcacttgaatccagaggcagaggctgcagtgagtctagatcaccccattgcactccagcctgggaaacaaaaacaaaactccgtctcaaaatttaaaaaaagacaagacacagaatgaaacgtaacatttgcaaaatagagatctgagcaacaatttgtattcaaaatatacaaagaattcttaaaactcaatagtaagataacctaattaaaaatgggtcaagatctgaacagaaacatcaccaaaaaacatgtagagatggcaaataaacataccgaaagaagctcaatttcgtatatgattgggggactaaaaattccaacaataatgagacccagcggtgtgagacggtgtgaaaacccaatggtgatgagacagcgtgtgaaaattccaacagtgatgagatggcgcggcccatctgtacccgctagaactgaggcaggaaaatcaagtctggaatcaggaacataaggcggattcacacttcaactatgacaggaaatgtcctctccacagggctactccaagtaaatgactttgtaactttacttcatcctcttcatttacacggggtggacaccaagtaaccattgaaatcctttagagggtatttaaacccccagaggttttgcaacggggcccttaggccctatgctcagcccgctcccacactgtggactgtactttcattttcaataaatctctgcttttgttgcttcattctttccttgctttgtgtgttttgtccaattctttgttcaagatgccaagaaccaggacaccctccaccagtaacacaactgctaagctctaaaaaaaactgacaaatggcccggcgcggtggctcacacctgtaatcccaggactttgggaggccgaggcacatgcatcatgaggtcaggagattgagaccatcctggcaaacatggtgaaaccccgtctctactaaaatacaaaaaaaaaaaattagccaggtgtggtggtgaacgcctatagtcccagctactgggaggctgaggcaggggaatcacttgaacccaggaggcggaggttgcagtgagccgagactgtgccactgcactccagccctgagacagagcgagactctgtatcaaaaaagaaaaaaaaaaaaggactgtggggaaaagagagatcacattgtttctgtgtctatgtagaaaaggaagacataagaaactccattttgatctgtactaagaaaaattgtttctgctttgagatgctgttaacctgtaactttagtcccaaccctgtgctcacagaaacatgtgctgtattgaatccaggtttagtggatttagggccggtgcaggtcctcacatgctgagtgtgccagtcccctgggcccactgttctttctctatactttgtctgtgtgtcttatttcttttctcagtctcttgtcccacctgacgagaaatacccacaggtgtggaggggcaggcccccttcaaaggacaaatgaattgctggaggaaaaccaggaagtctcgttcaccgctagtggaatgcttaatggtacagccattacgaaagatggtgtagaagaccagaatatgccaccctaaaatatgactctagagactataaaaaatggctctttggcataaggattattttcaactcattttcagaaaatgcagacacagaaacagagtagaagttaaccttttataagggaaatttacatctaccaaggaaatccccattttaacagagtctccctctcagtaccaggaacagaatgatgactaaatcaacagaggttcttctgaagggacttccagaaacaccttcacaaatgcacccataaaaacacacccagaaatagtgctttaccagctatgtgagtatcccttaatcctgtcaaggggacagctaaaattaaccatcccagtatttatgcctaatttgtggctaacattttatttttacatttttcttattattattattatttttttttgagacagagtctcactctgtcacccaggctggaggacagtggcacgatctcagctcactgcaacctccacctcccaggttcaagtgattctcctgcctcagcctcctgggtagctgggactacaggcacacgccaccacacccagctttttgtatttttagtaatgatggtgtttcaccattttggccaggctggtctcgaactcctgaccttgttagtatcattattttttttgagacggagtctcgctctgtcgcccaagctggagtgcagtggcgtaatctcagctcactgcaacctctgcctcccaggttcaagcaattcggctgcctcaacctcctgagtagctgtgattacaggcatgtgccatagtgcccagttaatttttgtatgtttagtagaaatggggttccgctatgttggccaggctggtctcaaacttctgacctcaggtaatctgcccacctaggccttccaaagtgctggaattacaggcgtgagccaccacgcccagccaagagcaggctgttaaaaagagtctggcttccttggtttctctcttgctttctctctcgccatgtgatctcaggtgctgggattacaggcgtgagccaccacgcccagccaagagcaggctgttaaaaagagtctggcttccttggtttctctcttgctttctccctcgccatgtgatctcaggtgctgggattacaggcgtgagccaccacgcccagccaagagcaggctgttaaaaacagtctggcttccttggtttctctcttgctttctccctcgccatgtgatctcaggtgcacactggctccccttctgctttccaccatgtgttgaggcaccataaagccccaccagatgcagctgcccaatcttggatgttcctgccaccagaatcataagccaaatggaatgaacttttttttcttttcttttattattattattattattttttgacagggtcttgctctgtcacccaggctggagtgcagtggtgcaatcatggctcaccgcagcctcgacctcctgggctcaagcaatcctcccacttcagcctctcaaggttgggaccataggcatgcaccaccatgcctggctaattttttaaattgtttgtagacatggggtctccctgtggtgcccaggttggtctcaaactcctagactcaagggattctcccatcttagcctcgcaaagtgccaagagcacaggtgtgagctaccatacccagccagacataacattttttttttttttttgagacagagtttcggtcttgttgcccaagctggagtgcaatggtgtgatcttggcacactgcaacctatgcctcccaggttcaagtgattctcttgactcagcctcccaagtaactgggattataaggcgcccgccaccacacatagctagtttttctatttttactagagacagggtttgaccatgttggccaggcttgtgttgaactcctgacctcaggtaatgcacctgccttggcctcccaaagtgctgggattacaggtgggagccgccatgcccggccaacataaatttttaatagcgttttctaatgaaagcaatgagggctctctgaagaaatggccaatacagggactgggacagtaaatatatgagccaggataattaacataccagaacaaaagaaagtactcaaaaaatatgaaattatgtcaaaaggaaaaaagaaccaatggaaagagctcccaaaggccaaagcagaaacaaattgagcaacaaaatactgcagtattgaataaccaaagcttaaagtaactgtctatgtgtccacatttatacaaataagtgcataagcaaataaagttgaatagaattctcctttacaaaagaattccaaataattgatatagacactcagccatcaaagaggtggagctaacatcccactccttaaatgggggctgtgcatagtgacttcctccagaagaatacatacaatatggacaagtaacttcacagtagagaaactggacaaacactagttcagccaggtgatcacagttaataccaatggtgataattcaccttgacaccatgaagtgacaagaatagcacttcacctctgtgatctgcttcccccaaacccataaccccagtcaacttctcagaaaagcaccaggtaaataacaatgggagacattctacaaaacgcctaaccagtcctccttaacaccgtcaaggtcattggaagaaggaaagtctgagaaaccgtgacagccaagaagagcctaaggagtcgtgacaacgaatgttacgtgggatcccgggtgcgaccctggagtagggaaagatagaactaagtgtaaacagtaaagttgaggttcctcttcaaagactttcctccccatctaattaggaataaatagtaacttctcttagatgtaaaaattattcaaagatctgtgctaacattcttaaatatctgctggccgtaataaagaaatcaaggtactgtatgttcttagcgcccacaatttagcctaaatatttgcctgacatgcttatactggtccaagcaagcattaggttatagcctcttcctcttccttatttgaaggtgtttttacctttcacagcattccacaagttacttcttccttcctttgttatcctctgcctttgcctcttttaaaaatttataagttgctagaagatcagaacaaatacagaatgtggggtcccgtttcagccaatggaaaccggacacagcagtagggtggatgcgtcaggttataaatgaccttgtctcctttgttctggatactctcgtggtaaaactgctggcgagtgtaccctttatgcagaaagtaaaaaaacggccttgctgaggaaattaaatttatgttcaagtgctatttctttacagcaccggggaacaagcatttctaacatgaggaactccaaataaaatatgggcttcagttaataatagcatatcaacatttgttcattcactgtgacaaatgacgtgagacatactgatagaagatgttaataagagaggaaactgggttgaagctacatgggaaatctgtgttttctttgttatttctgtataaatctaaaacaactctaaaataaaacttaatttaaaagtgttgtattttttcaaacacctgcttaattatttgtactagtaattactagtaatttaccctgttaactattcctgtcttttaatcagagcatttatgacataaaaattaaagcatacagattaatatctaattccaaataaatgcctctacatgttttatgttaaagtaataacatagatgtataaacttacttcacataattttttctggtactgtggctgtgtcttgggttcactctctaaaaaggtggtcggtcgccttttagacaaccaggaaaaaaattcattttagagactctatttcaattcatggttgaacattgtcaaaagaatgtttaaaaaagttccttagtatccaagatttaaaaaaaaaaatgtttcaatggcaaatcgattcatcgtgactggatcactttctctaaaatatccctgtctttgttttccatgcatgctttttagcaataatacaacagaatgcaatattggccactgggggaaaagtattcaaagatagaaagtgaatagaatttgtaaccatgataatttaatgtttcattgtgatattttctaaaacagaagagtttaagaatattcaaagtcaatttcctcaatgatactttgcagaatgtgatgaaactagagaaacaaaaatggcaggatattctgagtgattttagatgttgctaggatttatgggaaaaaataatttacctgttagagaatcacaaataattattggaagcccaaactctgaaatgtttccaaatttagttgaacttgtaagtaattataatgtcaatatagctagtcatgaagttaatgataaaagacgacccatgccttatttatgtaataaaatatacaatgaatgattaatgctcctcggaaaatacgctggacttgaactacaattgagagtgtcagaatcaaaatatatttgattgtataacaggagtagcccatcatgaacaaatgtatcatctcataaagtatgctcacgttaaatatactgtcagaacaatggaaaaagctgttttgcctttgttgaaagaataatggagacagtccagcttagggaattattaggttggaaacatacaatgctggcataagaacgtcctggacagggatgtaacagtgaacagctctggcaggtgtaggaaagggtcgcagccatcatatcccctccccaaatgctcaaactaaatctgcacatacgtctgtattaggatttggtacatgttatttcgtgtggggaggtataaacaatgcatttaaactttacgtttctagttagaatatgcctattgctaaatatttccatactgattcaactacttcagtgctgtgagacaaatgagctattacaacacgaatgaaagcgctggcgactccgcagcgccggccggtccccagccatcacccgcgccgtcccgatggcgccgctcgcgttgctcctttctcggcgccaggatctctccccaggaaccagcgcagatccggaggccacgctgcgctgcgctgcgctgcgctgcgctgtcaggacgcgcagttcccgccccgctgaagggacaccgttttacaacacgccgcgtagaccgtgacagggaagtaaggcccacggcagcgctccctcctcagcactcgcggccgcggacaggacgccttttcctcctcctctcacctggtgaccgggtgtcccgaaccgcggccgctcccgggcgggtcctgaagagaccgtggctccgtcttcccggtcgacgccccggggcgacgagtgcggatccgccgcggttcccgcgcgtgctccaggttgggcgggagccgggcgccccctcgcggcagtcctggggagtctctgaaaatcagcgttcggatgactgcaggccgtgatttcggaaatgtcaactgaaatcgaggccaccatcccgtgccttgatcggaacggatggagattttaaaaactaaaaaagatggcccgggcgcggtagctcacgcgtgtaaacccagcactttgggaggccgaggcgggcggatcacccgaggtcgagagtttgagaccagcctgaccaacgtggagaaaccctgtctctactaaaaatacaaaattagctgggcgtggtggcgcatgcctgtaatcccagctactcgggagtctgaggcaggagaatcgcttgaacccaggaggcggaggtttcggtgagctgcaccattgcactccggcctgggcaacaagagtgaaactccgtctcaaaaaaataaaataaataaaataaaaactaaaaaagatgtccagtaggcaaaagtcagttgagtttcttcatatcaccaataatggatggaaataattggaactagaaatattaaaataccatttacaatagcacccctgaagctgaatccattaagtatcagcgtaacaaaaggtgtgcaaacatgcattcggaaaaccatgaatcacagttgagagaaaccaaaagaggtataagtaaatgcagagatgttccttatttaggagaagtacactcattattgtgaaggtgacaattctttccaaatcgatctatagattcagccaaatcccagttaaattccaggcaaagatatcgacaaactgttcctaaacccagaatggatgaaataagactgaaggagaacaaagttaaagacctcacacatctggatctgaacactcaccctaaagccacagtaatgaagagagcgtggcagtggtgaagcggttagacacatagataagtgggacagaacagagagcccccaaacagactcaagccaactgactttgtcaaacggacaaaggcaactcagtggagaaagagaagtctgttccacaaaagacaacagaacaattgcaaaccataggggaaagaaatgaatggagacaaaaaccttgtattttatccaaaaattcactcaaaatagtccatagacttaaattttcaagtgcaaagttgtgaaagttatagaagaaagccgagaaaaatatctgcatggccttggtttgggtgatgagtttctagatgcaatacaccaaaagccaacccacaaaagaaaacaaaacaataacggggactttattaaaatttaaaatggctgctctggttaagagaacaaaaaagcaattcacagactgattgatagaaaatatttgggaaacagccgggcaaggtggctcatacccataatcgcagcactctgggaggcca[133 bp omitted]ttactcgggaggctgaggcaggagaattgcttgaacccaggaggcagaggttgcagtgagctgagatcgcaccactgcactccagcctgggtgatggagtaagaccctgtctcaagaaaaaaaaagaaaatatttgggaaacacatccgaaaaaggacttgtctgcaaaatatttttttttaaaaaaaacctctaaaactcaaaaagaattagatgaacaacccaattgaaaatatgtgaagatctgaaaagacacctcagcaaagaagatgcacagatgccaaataagcatccaaattaattaattctcaacaaacttgtcctgagggaaaagcagattaaatgagatagtactgtacatctattaaaatggctaaaatctaaagaacagtagcaattgcaataggaggtctcattcattgctgggggaaggcataagggtacagtcacttcagcagtttttccaaaaactaaacaagtctcaccatctgatccaacaatctccttcttaggtatttagacaactgccttgaaaaattatgtccaagtaaaaaccagcacacacatgtatagaagcactattcataatagccaaaaattaaaggaatcatgacattcttcagtagctgaatgcataaccaaactgaagtatgcggtgcaatggaatgctattcagcaaaagaaaggcatgacctatccacccacgctacccggatggacctcacaggcacactgcttcatgagagagaaagtcatgacctatccacccacgccacctggatggacctcacaggcacactgcttcatgagagagaaagaaaggcatgacctatccacccacgctacccggatggacctcacaggcacactgcttcatgagagagaaagtcatgacctatccacccacgctccctggatggacctcacaggcacactgcttcatgagagagaaagtcatgacctatccacccatgccacctggatggacctcacaggcacactgcttcatgagagagaaagtcatgacctatccacccacgccacctggatggacctcacaggcacactgcttcatgagagagaaagaaaggcatgacctatccacccacgtcacccggatggacctcacaggcacactgcttcatgagagagaaagaaaggcatgacctatccacccacgtcacctggatggacctcacaggcacactgcttcatgagagagaaagtcatgacctatccacccacgctccctggatggacctcacaggcacactgcttcatgagagagaaagtcatgacctatccacccatgccacctggatggacctcacaggcacactgcttcatgagagagaaagtcatgacctatccacccacgccacctggatggacctcacaggcacactgcttcatgagagagaaagaaaggcatgacctatccacccacgtcacccggatggacctcacaggcacactgcttcatgagagagaaagtcatgacctatccacccacgccacctggatggacctcacaggcacactgcttcatgagagagaaagaaagtcatgacctatccacccatgctacctggatggacctcacaggcacactgcttcatgagagagaaagaaaggcatgacctatccacccacgccacccggatggacctcacaggcacactgcttcatgagagagaaagaaaggcatgacctatccacccacgctacccggatggacctcacaggcacactgcttcatgagagagaaagaaaggcatgacctatccacccacgtcacctggatggacctcacaggcacactgcttcatgagagagaaaggcatgacctatccacccacgtcacccggatggacctcacaggcacactgcttcatgagagagaaagaaaggcatgacctatccacccacgccacccggatggacctcacaggcacactgcttcatgagagagaaagaaaggcatgacctatccatccacgctacccggatggacctcacaggcacactgcttcatgagagagccaggatgcagaggctgtacgtccccacttatatgacatgctggaaaggcaaaacaacagagatagcaaactgatcagtggtgacacgggattcatggcggtggggatttgaagtactccatgtgatactttaactgtggatacctgtccctgtccacttgtgaaaagtgatagaattttaaagcccagagtaaatcataatgtatgcaagtggaattacattatttaatatgtgggaatatccctggatggaacacagaatgtgaccaagaatctaactgtatcacaaaagattaaaacaaaatccctgcagggcaaaacgtactgacctgaaaggtc[146 bp omitted]aatacaaaaattagctgagcgtggtgacgcgttcctgtaatcccagctacttgggaggctgaggcaggagaatcacttgaacccgggaggcggaggttgcagtgagccgagatcgcgccactgcactcaagcctggtgacagagtgagactccgtctcaaaacaaaaacaaaacaaaaacaattattgaaccattgtatctccacctggaatggagcagtgacttatgtaagtggcagatgatgggaagcaggtctctcactgctgaggtgggaggttacagattagcaaagggaggctacaatgatccatgtgataataaaccagaggggcaacatcagcatcaactcatacttagcctaatccagacaccgacagctccacatagaaatctcgataatcaggcggtccacataggttggaaacacacaggtgtttcctggcacgtcagctgtaagacctaaaggcattgaggccgcaggggcaatgagtgcattcagctcctaaatatagtttttcatgcgattctacagtgaaaggaaccagggctctttgaagaaatggcttcactaaaactaaggcagtaaaaacatgagcctggatgatcctgaagtatcaaaaagtaaggaactgctcagaacacagacacacacactctcaccccacacacacacacatacacacaagcacacacacacacagattatgacaaagaaaaaccagagccaacaagagctcccaatgacacaaatgggaatgaataaagcaacaaaatcctgtagtactgaattgtaaccaaaacttgaaataactctccaggtgtccacactggcataggtcaatgattacacacgtaaacaaaagtgggtgagagaaatctcctatgcagaaaaatcccaaataattgtagtggacactcagccattaaggaagtggcgtta[131 bp omitted]gcgctgatgtagaaattgcaggcaagttatccagatccagctaagacggttgatgaaaatggctacactaaacaacatattttcttttctttttttttttctttgagatggagtgtctctctgttgcccaggctggagtgcagtggcgcagtctcggctcactgcaacctccgcctccctagttcaagcaattctcctgcctc[134 bp omitted]ccctcccaaagtgctgagagtacaggcatgagccaccgcgcctggcctaaacaacatattttcaacatagacaaaatagccttcttactaggactttcatagccggggaagagaagtcaatgcctggcttcgaagctttagagaacaggttgactctgttcttaggggctaatgtgacttacagccaatggtcatttaccattctgacccagggcccttaagaatgatgcaaaatctactgtgtctgtgctctataaatagaacaacaagcctaggtgacagcacatctgtttaatgtctagtttatggaatattttaatctgactgttgagacctattgctcagtctgttgttgcccaggctggagtgcagtggcatgatcttggctcactgcaacctccgcctcctaggttcaagtgattctctcctgtttcagcctcacgagtagctgagactacaggcacccaccaccacgcctggctagtttttgtatttttagtagagacaggatttcaccatgtccagaccatggtgagaccatggccagactggtcgcaaactcctgacctcaggtgatccacccgcttcggcctcccaaagtgttgagattccaggcataagccaccacacctggccaagaaatacatattgtaaggctacagctgctacagataatgattcccctgatggatctgggcaaagcaaattgaaaaccttctgaaagggatgcaccttctagatgccactaagaacatttatgattaattcatgtgaggaggtcaagaatctcaacattaacaggagtttaaaaggactggactccaaccctcacgaatgactttgggggattcaagacttcagagaaggaaggagccacagttgtagtgaaaatagcaagagaattagaagtggaagctgaagatgtgagtacattgctacaatctcatgataaaactgaacggatgaggatgtgcttcctatggattagcaaagtagtttcttgagacgaaatattctcctggtgaagaagctgtgaacattgttgaaataacaacaaaggatttagattattacataacctagccgggcgcagtggctcacacctgtaatcttggcactttgggatgccaaggcaggaggatcgcttgagcccaggagttcaaaaccaacctgggcaacataggaagacctgtctctacagaaaatttttttacagattagctgggtgtggtggtttgcacaggtagccccagctacttgagagcctgaggcaggaggatagcttgagccagggaggtcaaggctgcagtgagctatgatcacgccactgcactccagcaagggcagcagagcaagaccctgtctcaaaaaaaaaaaaaaaaaaaaaaagaatattacataaacttagctgataagcagcagcaggatttgacaggatagactccaattttgaaagaagttctattgtgcgtaaaatgctgtcaaacagtatttcatgctatagagaaatattttctggaagtaagagtcaatcgatatggcaaacttcaaactccagaggggacactgctgatttcacatccattggaaagacttctttttttttgtttattttttttgagacagagtctcactgtgtcacccaggctggagtgcagcggtacccactgtagctcattgcagccccaaactcctgggctcaagcgatcctcctgcctcagcctcccaaagcgctgggtttacaggcatgagccaccaaacctaggaagacttcttgcttttttttttttttttttttttttttttgagatggagcctcgctccaggctggagtgcagtggcgtgatctcggctcactgcaacctctgtctcccgggttctagcgattctcctgcctcagcttcctgagtagctggaattacgggcacccaccaccatgccctgctaatttttgcatttttagtagagacagactttcactatgttggccaggctggtcttgaactcctgacctcaggtgatccacccgcctcggcctcccaaaatgttctgattactggtgtaagccaccgcgcctggccaagatctctttctggacactctccatgggacatttgctttttcacttcagagatgtggaatttcttgttccaacagtttctagtcagtaaaccctgtgactatcccaggcatgccacggccaaccccttccatgaaacgcttctcatgagaatagatctgggatctggcggccgcatctcttcccacaggtaactcttctgtatgaccccagctccaatgctgtctcttgtcctcagaatctgtaatttattggccttactgattgcaactatatcatccttacaaggcccacaagagcccgggtgacaggcactggtgtccttctctggggttaaaggtgcatctgcatgtgtctccttgtggatcaaggcctccatttcaactagtagatgtgagacgtttgctccaatggaggacagggctccaggtcacctcctccctgcacatgggcactcggggctagcccagcctcctttcccagtgggctactttccagtctcactcacaatggctctgagtgactctggaaagaagacagttatggaacctctccctgtccaagtcattctgctgatagatctgcataactcatctcagcgaagcctggaccgccttgggaagattacctctgcctctgtaattcagacaaagaatatgaggcgcagaggctgtgaccacgcaggtgacccagccccgtctgcagtagctgggattgaagctaagttctcacattcacagggtgccatgagggcctcctgatctcaagatccaaagtgtggctggcatttccattaacattgacacacatatgtgtgagcattttgatgtgtaaaattttgccaagtgtctcacatattatcttttatcgtagtcacagaattctgtcttcctcgatataaatacttgtctttttagagttgattttccatagagccagcagctaaaatattccaaatgtgtttttcaccatggttgtttcattgttggaattcatgttccattacgtggcaatgcatctctctctgctgctctcccacctgagcagcagccaggctaacaatacgccgggggcacgtctcctcctgagcggcagccgggctaactatacgccgggggcacgtctcctccaagggaagaaaacacctggcaggacgtgacattctgaactgtgaggacttttcggggggaccaaagtttctgaaggtggcagtttgtgtctcagtctccatggggtccagaattgaccacagagcagaaggcaacagggagccactggattcacggggtggctttaacgtttaagctccgacataagaagtcacgccctccctgcgtttcaatgtccacaaataccataaaccacctgcataactgtctaggagtttcaactcatcgtccaacgtctagaggaaggtgctttcaaatgtttataatagatcaggtcaggatgtggactaggatgttttatcaattaattaattgattgattacaaaatgtaagtcttttaatctgaaatagggctggagaatttagcaaagtattatcaattccacatgagccttcaaagatcagttgtgccatctgcctctcagtaagcattggcatgtgacgtttctttcctaacatggggtttaatttcatttagctactgttccatccattcataatttgaaaatcattttgtctttagaaaaaccgtactactggccaggtacagtggctcacgcttgtaattccagcactctgggaggctggcaggaggattgcttgagaccaggaattcgagaccagcctgggcaacatggcagaaccccagtctctatcaaaaaaaatataaaaattagccgggcatggtggcgtacatctatacttcccgctactcgggagtctgaggcggggggatcgcttgagcctgggaggtcaaggctgcagtgagcagtgattgcaccactgcagtcatgcctgggcgacagagccagaccctgtctcaaaaaagaagaacacccacacccctccaaaagcatactattaccttttctattagatatctcaactgctgtacatattgctcaaagttatgacaaaaatctctcatgttgtgttgtggattccctgaggtgcagcctgcggtgtggccctggactcaggaaacccctgcagggaagctgtgttgcttgtccacgtgtgggcggggggaggtttccagccagacaggtgagcacctgcagcgacaccctcccgtccacacccaccctgccctgaccccaggcgagggccatggaatcacaggtaagtcttgtttactcggtcatcatctattcattcactgggctaattcattcataaattccattgctggaacctcataattccaaataacctaagcttccctctgctgtgcattgccctcaccacatgccttgcctggtctgttcattcttcctggagattccctgtccttgtaatgccattaaaatgtctaaactaggctgcttgcttataaaacagcaactcaaagtaaaaacaacaaacaaaactaggcttagatccaacaaatcacaactgttcaaaacaaggctaacaaaatgccgcagctcgttacgtctcagaaatgggaagtcaagaggcgaagggtgagacctgggagctgtccagctcctgaaaatacgcagcgggagactgaagaacaaagattccctacattgcagacaacgtgcctcttcccgtcgtaggaggtggtcagcagctgagagcacggggggcagacattcaggcttggggctcaacaagcctctgggaaaacacccagaccaaccctgggggctcacagacccccaaatccccatcaccaacgcggtccagaaggccacaggccacaccactgccgtgtgaagtcaaggaaacactgccttcttgcatcaggtcctaataactaacgttaaaagtttaaataatgtggccgggcacagtggctcacgtctacagtcccagcaccttgggaggccgaggcgggtggatcacctgaggtcaggagttcgggaccagcctggccaacacggtgaaactccgtctctactaaaaatacaaaaattagtcgggcatagtggcaggtgcctgtaatcccagctactcaggaggctgaggcaggagaacggcatgaacccgggaggcggaggttgcagttagccaagatcatgccactgcactccagcctgggcaatagagcgagagtccttctcaaaaataaataaataaataaatattgtcccactaaaagtaaaggtaatgacattttgaacttaggacaattttctcaggcagagttttacttttttgacttaagataaaatttttcaaagagtagcttagtgatccccacatacacagcacatagacttaacagccactaatattttgccatgtttgattcatgtttttgtgttatgaaatattgtaagttgcagacatcacaaaatttcactcctaaatacttcagtatgcacctataagaaaagtaaccacaacagtgggtgcggtggtggcgcctgtagtcccagctgctcaggaggctgaggcgggaggatcacttgagcctgggaggtcaagcctgcagtgagcagtaactgcaccactgccctccagcctgggcaacagaat[136 bp omitted]cccatctctactaaaaatacaaaaaaaatcagccaggcgtggtggcgggcgcctgcagtcccagctacttgggaggctgagcaggagaatggcgtgaacccgggaggcggagcttgcggtgagccaagatcgcaccattgcactccagcctgggcgacagagtgagactccgtctcaaaaaaaaaaaaagtacgtatgatttcctacaaaaccacaataacatattgtagctaacaagctcaaaaaaatttctgcctctcatcaaatactcaggagtttttcaaaaaccaattagcctcagaaggtaggagaaatgccgggccaggaggacatcgccatgggaaatgatatttacatggctaagaatctgagtttcctgtgagaaacaacggaaaaaataccctccttgtacaatgagagaaaatactatttttttccataaaaccataagggtgtgggcagtgtaaacctaaaattatgcacgagagcttccccatcgctctgtgtgggtagagaaacactccagcgtgtctgctctcttggtgctgggaatctgtgagaattcctgagcccgacacacagcgtctcggcttttctcatcagatgcagaccagtgcatgcatagtccagctgggcagcacagaaacagcgagaggccactggctcccaaaccaaagctgggcccttctggctttggaggaccctctggggatggctgtggtcagcacagctctttccttctctgctctcacagctgtggtgccggtggtctttgtgaagcacggagactcccccagtcaaggccaacggctggactcagctgcgtcatctccctcaccccgagcttcctctgctccttactcttcactggccgtcccaacacggccacctgccccccagcaaaccacatgagtcgtgtgcactgtagctgcgtccacagacttgccctcatccctcactgtggtcctggctttcaaggccattgcacctgggaggagactgaggtgttggctggtgtcagggcctctgcatctttcccatttgctcctgatccaagtgactctgtctgcggggtctggctgggaacctctcccccatccactgccagaggctcacattctgagcccagatacatcctggtagtctgcgtcctgggatacctgagctccttggccctgggaagcttcagtgtgactttcttggccaggaacctgtctgacacctgcgtggagccaagtccctgacgttgagcgagagttctgcagtgtctgggtcaccttccttcccatccgccaagggcaggtctcctccatcttggcccctagggtggggatcccaggctgcatctttgccccccgccctccccgcccagtgctacattaccctcaccgtaggctcaggcctgataggaacatcctgcaagggccggggaataagatacttaagttacccactttaaaaagacaaatttaccctttttactctccattgaaaaagtaagctctgtatgttccgtattcatttcagggcaaccagcccctgaattccctgtttcagaagtgtggcccccaggtgcacaggggttgacatgaacagaggggaggggttcgggccagagagaccagctttgggcctaaaggacacagggactggacgaacctgtggaaggggttcagaagggggctgaggcgtcagctccaggctaaaatcctgtgtgtggtccttcaggcctgacaacaggctctaccggcggacctcccagggatactgccctccccacccagactcaggccctgggggcgtccagccacctgctcactcacaccacgctctcagctcaagtgcctctattcagaagcctctactaggaacgtggggcaggggcctccccgagggaggctgggtccttcaacctgcagcagccttttgtttaggcccctctcagcagtgaaatgaccctcgtgtgtgctgatccacctgacccttgaccccagcactgtgctgggagaaacgcaaggggcgggttggcttctggcttctaccatcacagcaggtgagtttgcttgatagctgagctgcgctgagcccagcaggggagccctcggatgtgagaaacacagtcccagaacggccataaggaacagaagcactgagaccgtttgtgaaacaggtgccctattttactaaaaaccacatatacattacattttacaaaacagcaactatctgatctctcggtcccttccttaaccccataaaaagaaggggatatttggggaccgacgggaacaggttcccctccaaatgctgagggctacccaggcatctccagactcctggtccagtgcagggcagggggcagcggagcccgctcactgctcccatcagcccagggttcctggagcccgtccagagccctcagtgcctaaccagggctggagggaccacctgggtgggcctcagctggactcacagcagctccctgcctgggcggggtccggcctcaggaggaggagtgcgggtatccatagtggttgtggtcagcctcgcccagggtcaacgtcagtgacaggctgggcttccgttccagctcctcctccttcagacagtgctgtgggggtcgggctttgaagaagtctgagatgtagcagacctggtagagcagagggtggtgagaatgggcagggggctgtccaggtaccagggacatgggcatgagcaggagggggaggaacagggtcccaggtgggagcgaggggcctaggtgggaaatgagaggagtagtgcctggggtgggaagagagcgctcttagtggaggaccagtggggagcactgaggagctgacaggccccgggaagaactgcagtagggccaggggtccagagaaggactggggtgcacggaaaggagtcctgtgcactggggtgcaggggaggaatgggggcatggaggggggtccagggaaggactgggattggggggaaggggtcccaggggaggactttgggggtaatgaagagggtccaggtaaggactgggactggggagaaggggtccaggggaggactggggggaaggatggggtaaagggaaggactggggttgggggaaggggtcccagggaggactgacagggaggaggcccaaggaaggactcagtggggcaagggtacccagggcagcactagggttggctggggagtggtctctggacaacacaggggatagagttagggttagaagctcacagtgagggcagccaccagtgccccctgcaggaggccaacaaggacatcgctccagtggtgtttgtaatcagacacgcgggtgtagcccacgtagagggcaaaggccaccaggaagaactggactgtgggtcgcagcagccgtgcccacttccaacagagtcgtgcctgcacatacagctggagtggggagaggacgtgttagcctgtgcacctgccaggcgctccccctccccctgcacagacgtgttagcctgtgcacctgccaggcgctccccctccccctgcacagacgtgttagcctgtgcacctgccaggcgctccccctccccctgcacagacgtgttagccttgcgcctgccaggcgctccccctccccctgcacagacgtgttagcctgtgcacctgccaggcgctccccctccccctgcacagatggcagcactgaggccggaggcaaacactggtcagcccagggcctcccgtttttataaacaaatcagttagcccccctcaccaccactacccacccattttacagctggaaaaactgaggtccagggaagggagtgatttagccatggttcccccgaaaagcaagcccgggagaaacagactcaccgccaagaacaccatgcagtacatcccaaaggaagagtgtcccgagtagaaagacaacctgaggaaggagaaggggcaggtggctcactcagcgccttccaacctcccccttgtccccgccccgcccacagaagggagggctcgacacggaggctgctgctgttagatgcactcaaatcccagtagcagaaactgttccccttttctgttccagtcatctgataatggaataagagtctctgactggggctgtggcatgagatgcctcatccgtgaagactctgaggcctgaacccaaaacccagggcagacaatcatgtctggcaagcaggcaacaccacagtttcattttcaccatgtttcttttcaggattttctcccatctgcggaactgagggaagacttatttttatataaattcaagattcggtgaaggacatcaagaaaatagcagagcaagaaacttcaaaagcaatttttaaaaatggcaaaaaagtcacaatcaacttttttggaactactcaaaagcttgcagccaccagaagacttatcaagataaaccagctgaatctcagaacaaacggccttgtcgcattttaactcatcctggtccctctcccactgcctagactggtggtggcctgaggattccaagaacagactttatttgcaactgtggacgggagtatggctcaagggctggccttgatctcacctgactggacattctcccagtgctgaggtgctacctgggggatatttgtaggaaacattcacaacaaatttattattctctgctgcctggggccacagacagcagatgaggcaaacaacagactaaccaaacaggccagggaataaaatgctctgggcgatgggggcctggaacgcagacagagctgtgcaggagctcaggagaggcctgcgagggccgaagctaagctctcacgtctggccgccttcaggctccgcacacacaggaagcaaaagctaaggcagagttgaaaatgtgtttaaccgcggaagggctgaccccacatgcacacagacccttctacaaactctgggagggttttatgggtttttttgattccagatgtttaaggaaatctctgtcctatcactgaccactgggctaaaagaataggaagaaacggccatacgtgacaaaaaatacagactttacaaccagaaaagtcattaaacaaataactactgcaacaaacagcaagaacaaacccgggagagggcgtaggatcatatttccagagttgctacattataatattctaaacacccagtttaaaacaaagcaaaacaggccgggggtgcggtggctcactcctgtaatcccaggactttgggaggccgaggcaggcggatcacgaggtcaagagaccgagaccatcctggcccacacggtgaaacgccgtctgtaccaaaaatacaaaaattagctgggtgtggtagcacatgcctgtagtcccagctacttgggaggctgaggcaggagatttgcttgaacttgggaggtggaggttgcagtgagccgagatcgccactgcactccaacctggcaatagggtgagactctgtctcaaaaaaaaaaaaaaaattacaaggcatgtagaaaaacacaggtgtggccaatacacagggaaaaaaatgtaataatagaaattgtccctcaggacacccagatgttggacttactagacactttctaagagagggcctgacttgaacttctgggctccagcgatcctcctgcctcaccctcccaaatagctgtgacaacagttgtgtgccaccaagcctgggttctagacaaacacttttagttagccatttaaaatatgttcaaagaaaaaagtaaaaataaataaatactatgttcaaagagccaaaggaatatgagaacaatgtctcaccaaacagagaatatcaataaagagaaagaagttataaaaaggaaccaaataaagatttggttatctgaaatgaaaaatcacttgagggaggctcaatagcaggtctgaggaagcagaagaaaaaagacaatgaacttgaaaataggtcaattggccgggcacagcggctcacacctgtcatcccagcactttgggaggcagagacgggcagatcacaaaggtcgggagttcgagaccagcctggccaacatggcgaaaccccgtctctactaaaaatacaaaaattagctgggcgcagaggcacacgcctgtaatcccagctactcgtgaggctgaggcaggagaatcgcttgaacccaggaggcagaggttgcagtgagctgagattatgccactgcactccagcctgggagacagagcaagactccaactcaaaaa[144 bp omitted]tctacttaatacaaaaaattagctgggcatagtggtacacacttgtaatcccagttactcggcaggctgaggcagagaatctcttgaacccgggaggcagaggttacagtgagccgagatcgtgccactgctctccagcctgggggacaagagagagacttcgtttcaaagaaaaaaaaaaagattattcggctggggccaggtgtggtggctcacgcctgctactcaggaggctgaggcaggagaattgcttaaaccgaggaggcagaggctgtagtgagacaagatcacgtcaccgcactccagcctgggcgacacagtgagactctttctcaaaaaaaaaaaaaagaaaaggagaaaaaaaacattattcagc[138 bp omitted]atgatgaaaccccatctctactaaaaatacaaaaagttagtcgggcgtggtggtgcacgcctgtagtcctagctactcaggaatctgaggtaggagaatcgcttgaacccaggaggcagaggttgcagtgagccaagatcacaccactgcacactgcactccagcctgggtgacagaacaacattctgtctcaaaaaataaaattaataaaagtaaatgaaaatacaaaaattagccgggcgtggtggcgcacacctgtaatcccagctactggggaggctgaggcaggagaagcacttgaacccaggagatggaggttgcagtgagccaagattgcaccaccgcactccagcctgggcccagactctgtctcaaaaaaaaaaaagaaaaaaaaaaaagattatttaccctgaacgggctcagtggctcacacctctaatcccagcactttgggaggctgaggcgagaggattgcttgagcccaggcattcgagaccagcctgggcaacatggtgagaccctatttctacaaaaaaatttaaaaaccagctggatttggtggtgtatgcccgtagtaccagctacttggaaggcagaggtgggaggatggtttgagcccaggagttcaagtcctgggcaagatagcaagacccccatctctaaaagaaaaaaaaaattaaaagcaaaacaaacaaacaaaaaaagacagtaatgaggaattgaaaaaagaagatataacctaagcaaacctcaacgaaatgacagaggtccttccttatcagtaattacattgaatataaataaacactccaattaaaagtcaaagtttcattaaatgccttaattcaataaaaagattaatatataatttaaaaaacattaaaaaaaaagtcagagatctggctggatgtggtggcatacacctgtaatcccagcactttaggaggccaaagtgggcggatcgcttgagctcaggagttcaagaccagcctgggcaatatggcaaaaccccgtttctaccaaaaaaaaaataaacagtagctggatgtggtggcacgttcctgtagtcctagctactcgggaggctcaggtgggaagatggcttgagcctgggagtccgaggctgcagtgagctcagatcattgcactccagcctgggtgacagagtgagcctctgtctcaaaaaaaatcagagattggacaatacattaagaaacatggcccaatttcatgctaggtataagacacttactttacagtcagagacataaacaggttgaaagtccaagaatggaaaaaaaaaatattccatgcaaacaataacaaaaagagaaccagaatagctatgttaatatcagacaaaacagacatcaagacaaaaattgttgagacaaaactcatatatctcattctatgatgatgaaatggtcaatctttcaaaaatatataacaattacaaaggtaaatgtactaaacaacagaaccccaaaatacttaaagcaaaaactgacagaatgttacaacatggatgaacttcaaaaacatacaagaatgcactaacttatacaaaaattagccgggcgtggtggcgcacgcctgtagtctcagctgcctgctggctcttcatgatttggctccagggccttcttcagctcccattccccacaagagtgaaggctgctggtccacacccacctggcctcggtgacatcagcagggtttcccctgcacaccttctccagctgcacatagaccgagcagttgacccggctccagtcggggtcgcagacggctaggaagttgggcctcagacgcccaatcatgtacttggccaggtctgtcagagactggctcacggcagccccaaacaggaaggtccccagcaccttgtatacagcagccacgtagttgttgaagtccgagcgagaatagagccggtctgtgtacaccaggtaggcttccccggccgagacctgcaagagcagccgcaggaaccagtgggggtctcggtcggcccaggggccctcactcctccgcacgggcctccccaaggctgctggagagctggggactctgaagggggccctattacccacaggtaccactcagggcaaggctgtgtcccccggccccacacagacctccagggcagggctgtgccacccccccatcaggcccccagggtaaagctggccccaccccatccccctacccagtccctctgagcccctcctgccttacaaggatgacggtggccgtgatggtgaccccagccatgagcccgtgggtgatggtatctggacggtaggggtaccggatggagtcatccccgcagtaaaatcctcgcttgtacggggcgttcaccagcgtcaggatagcgaagggcagggaggctggtggggaagaaaagcctgggagctgtgaggttctctcaccagctgggccttggggccccacacacctgccttggcctggaggcctcccacctctactctcaccagacagcaaggaagagcttttttcacagcccaaataacactccctttcgcatcccctcagacaaacacaaactcctcaggcgctctgcccctcacatcctggcagcctcctttctgctccttgaactaactcagcaaacacccacctttgcacagccacttctctctgcccaaaatatcttttttttttaaatttttaaaagtagagacaggggtctcatgttgaccaggctggtcacaaactcctgggctggagcgatcctccagcatcagcctcccaaagtgctgagattacaggtgtgagccaacgtgccaggccccaaagtatctctaatttatgtgcggggccccaaagtagctctgagtaacctccactctcatctcccctgctgactgtccatgccagcatccctctcacagaaggaaaggtctgctctttttccctcttccttatgcaaacctcatgtggaatttggcagtcacgtgtgggacactggaattgatttccccccatccacccaccggcaccaggaggggcctaccgtattcagggcagagtccctggagcctgctcagggcctggccagggcagatgtttaataaacatcggttaaaataaggcaggacttcttttaacctaagagcaggccagagaagtcaggaagaagccaaggaagggcacagctgagacaccttcgctcacgcacttgccccttcatcgaccagccacgtggtgaccaggacagacccagccctggcctcagggatcaaagacacattcaggagccacttatggaaggtgctgccatggcactggggctcctggggccctgctgagctgagggtggccagggaagcaggagtcatctacggagaacggggcagagggcaggcgcacaacaaaagcccgggtcggctagcccagagacaaaccaaggcagggcatcctttggcccagcagggcaagtacaaaagggtgtggcttttctaagttctgaatgtcagcggaggggcagggagccccacactcctcccgacatgctaactccaagggccctaggacaccgtacaccttccatgctggctaagtctggggaaataatctggtgaagaaaacagaggcctgcctcaccgagcaagaaaggtgagggaatgcagaacagaa[137 bp omitted]cggtgtcccagctcctcgggaggctgaggcaggagaatcgtttgaactcaggaggcagaggttgcagtgagccgagattgcaccactgcacaccagcctggcgacagggcgagactctgtctcaagaaagaaaaaaaaagggcagcgccagggcctggaggcagggcaggacggcggagagggcgggatgtaagaacctgccttctgctcccacacaggaggggctggagctgctgtgaagggagaggccttggaggaggctcctgcagttgccggccgggtggaaagtcagggttacgagatgcccagaagggagtgcagcccgaccacagctcttatcgggcggaggctcacacaggttagcctccgtttccgacctccctgccccagcaactccaactagagacgcaggcacccccataacgacaggcgccgggcttccctcggcctggaaagctctccctggggtccccaaaacagacaccttctcttcatttagcccccgggagccctcccgccctcacactgccctcatgccagcatctggaacctcagtgttgactgaactgtggtgtgctcaagcttccagcatagaggtgcactcggcctggccaccacccctggcacacagcagcaacagccaaccccatctcggctgtacctcccgctgctgtgtgacctccggcaggtgactcagcacctccctcacaggctgttgtaagggaaatgtttgttatttgcatgttgcttagttcctggcatacagaaagtgccacctaaatgtttacataaataacaccataggtgctcaggaaatggtaccacgggctggcagacacccacagggacttcttgctgtcacctggcccaccctaaaaaagggtctccttccggaggtaagaggacttggcctctgctgtgagatggcagagaagcaggaaacacgttggggaggagggcaccccccagagatagaattccagggccattgtctgtgcagccacagagcaaacactcggcctttgttcccgggaccctgcgggaggggggcctcgggatgcccattccgccagtgtggcccgcaaacccgccggacaggtttggttctcctggcctcccggccccccgccaccccgttcacccgaagcctgggacccagccttcatccccagtgtctcccccgcccgagccagcagggcggctgggcctccccgcacgtgcacgggttcgaatcccgccgacgcaccgggtgccaggaccgagggtcagccctctccgcgcgcagcgggagcgcccaccccaggggcggaggcgcggacgtcctgccggggtaacccgcggccgcccccacctcccgggcccgcgtgactcacctcccaggccaggcggggcgggatggaggcgcgcgcgcggcccctccgcacagacttcctgctgccggggcgggggatgctggccccggctccccgggcctctcgcgacccccatccccctgggcctgggacgcggggacccccgagcctgggagggcgcgcgcagtgcggggcgcggagggaggtctggtcctcacgcgaggtccccgcctccagggtcctcggagggacgagggcgcgcagcctccgcgttcccctgcaaacttgcgcgcagccgggggcgtgtccgtcccgggagggtccccccaacacccgggtccccaaggctcttaccgaccagtaagcacagcacgtcgagcagcacgaagacccacctccgctgcatggtccccgcgacccccgacgccggtcccagcgcgtcccgtcgcgtcccggcccggccgcggagtcacgtggcgcggagcccgccccgcgcggagaggaggggaggggcgggaaggggaggaggggaggggcggggagggcacgaggggagaggtgaggaggggaggggaggggaggagggagggttaggggcggggaggggaggagggagggggaggggaggaggggagggctaggggcggggaggggaggggggagggggagggaagggaagaagggggggaggggaggagggaggggggacggcagcggcgggcaggggagcagcggggggggcggggcgcggcggacccgggaccgcgcggactctgcccccgcctggccgcggcgcccaaaagagcgggtggggcgagcgtgcgggcgccacggggacctcgtccgcccggagtcccggccctgacccgggctgtgcgggtctccgagcggcgtgaggtcctcagaggctggaggttccccgcgggtcgggccggcggagccccgggcggggacgtggagaaggaggacgagcagcggcgggaccggccccgcgggacggttcccgactttcctcctcagggagtggcagccgcgccgtgtgcgcctggaaactccgacagcaggaggcaccttaaagtggaaggggcgacgtggcttcatttcaggagtttcttttctcctaatactcaaaatcctggcgcgtccttggacccctggcacgttagaagctcgagttcctcggcacccaccttgcgacggcgtagggtgtccaggcgcagccctgtgcccaggcaccgttcctatcagcgcacttgctgtcccatttcacagaagagcacgggggcgccaggagctgggaaccccatgaaatggcgccggggtctgtgcccccaccaggtcgtggggagccctgagctgagggtgcctggggattgagggcacctgagccagggaaacccaggcccaagggacccacactgggtcctttcggctgggaccatccgggaggcctcaggagtgtcagacccacgtttccggagtccagccttgacctctgccactcacggtcacttaaatgggaagtggcaggcctggggtcagaaacaaggctgctgggccccagatccgctgccaccctgaccctcctctaaaacccgttcagcaccaccatcagccccctgccccagcaacaccaaaacagggtgcgtctcagcaactggacttcaactgggagctcctcgaccctgcttcccggatggtcagacacctgcacgtggggcaggggggcatcatgagggaactccaagggcaaggggctcttgggagacagcaaaggcacccagagtggtgctgggtgggaagacggtgcaagctgacctgtggccctccaagggcagggttgaggtgctcccttgctgcactcacggtggggtgggggggctctagctcccgtcggaattaggattgtgagggttctggtgcctagcatcaatgctacataaatgtagggttcagcgtcactactgcgctttcccccacacttcaccctgtctgcaaatgagtgaccactgctgtcagtgtagtcttgacagccaacgcacattttctcctaagatggagagggtgcaacatctactggagtcaaggaaaggcggtgttcttcattgagcacctactgtgtgctggggagcaagggagaggtcacttggaggggcctgccaaagtgggagcggggggaagacagtgggggctgtgggatggggccaagccaagagggagagacccaggagaggggtggaggtagacctgggaggatagagggtggaggtgaggctgcaggctgttcccccttccatccttccccttgggtcaggatttgggttagcccttaaaatccctgggcaggataaggattaaaatctggtggggaaagcaagaattaggattagggtcaggattggggtcgtctcctacatatgctgactgcagcccaccacacttcaaggaacttcttgtcacggctttcatagctggatctgctgctgcccccagctgcctggtcctcccttccaggaagaacctgaggccagggcagctcccagcagggacagagcctggcctggaggccaggcctcagtggctttctccttcacctgcaaatagcagagctggaagcgggtggtggtacatgtacccaggctgggtcccctagagacaagcaacccctgagggccaggtcgccactcccaggcaagcaagctcacgggttcagcaactgcagctcccgcctcttgcccagcactggctctgccaccttggtgcctcatcgcaacctggatggctccgggcctgtttccaaatggactctatggagactaagacacctgtgaagtgggcagaagggggcctggcacacagtaggtgccacctaagtgcagccagccactatacctgccgttgctttctctgcttctctgggacttgagaggtgaagtaccttgcccagagtcaaaacgggagttgtctcccaggttcctggcacggggctcttggagtcgaacgagtgcccgtcagtgggtttgacgtgcaggcagtgggcagggaaggctgagggggtggatggtttggaaagacatctaaggtatccctcagtctctgtctgcataaaggcggcaagacagtagctaccacctgggattgtagagaagattaaatagtttgtgaaatgcttgacccagggccaaacattaggaaacatcatttgagggttaattgaacaaaatacagtgtgggtaggtatcacgtgtttgctgggtcaagatgtagaaggtacttcttcctggggtcaagatttaaaagggttggaaaccgctgccttcaaattcacaatccaggacccacgaattcaaaattcccctcggactttgcaatccttggagtgcctcttaatttagtgtaaccttacagtcagtcagggacagggtaaccctccgggtttcagcaccgcgagtctgctgtgctctgtctgtgaggaggtcttcactgggtcacagcaaagaaaaacacacagcagtagtgctggacgtggtcgccagagcccctcgcgcagacaagccgggacgcggcccccctgccagagcccctcgtgcagacaacccggaacgcacagcccctcccaccatctcagtctgtgcgttcgttcactgtccccgtctcctcccacgagctccaggaaagtgggagctggcacacagtgggtgcgcaagccgtgcttactgggatgcccagagcctgaggtcaccagggagctgacagctgcagggagctctccctgggtcacagcaaggcaagacacacaagcaacagcggagggcaacagtgcgttctcaaagggagagctggtttccgcctgcttctcgtacaaaacgaggggcagagatggcaggggccaccccgcgaaacactcgattaaatccccgttcacaaaccttcctgatgcctggcagccctatccctgcccccgaaaccagcatctggtgaaggcaaggagaggcacctggaagacctcaaatctttgcaggtctgcaaagccactgagcacccacagaccccaaggacctggttccgactcaaggaagaacaaggacggtggtggcggaggggctccagagaactcgtaatgcctctggtgaggccaccgccgtcctgcatctcttgatgtgactggtgacagcccaccagggcggggaaccggttcacctcccaagtgctcaccgggggccgcgctttcgactctccctgcacaggccgtgggtcgtggctccgggtgagtggaaacatttgccccgcagcgaccaccgcccctccctccccgacctcgagccacaggaccaggggacggggctgggctgcgctctgggccccgcgatgcctccgggaggcacggccgccctctgctggacacgccgaggaggcgctccacgccagggtctcaacatcctcctgagaacagcccagcaatggggcaaataaacatcaaggaccccctagctgagtcctgatacctgtgaaacaaacaggacaccccgttacatttgaatcccagaagagcaacaaaccggttttcagtatgtgtcccgaatactgcatgggacatacttacacattcgtttatctgtaatccgagcccaactgggcatcctgtattttatctggccatcctacccaggaactacaaaccgagaaaacaaggaccatcagggagagagaaacagctgggtcaggtcagtgggggcccagacagcgccagtccagggcccggacatcttcaacaaagcctgggcctgggaggctgaggctctggggaccgtggccggtccaggaccatcagttctgagcgactttctccctcccccacttccacccccacagaaattgtctcaggagggctgatctccaggcaggcccctggctaacgcctgcttcctggcacggccatggactctgtccagaacagatttccatatttggttagcaggtaggaaggaggtcatcaaagaccttcacttcactgtaaaaggaaagcattaaataaacgaacacaaatgacttttatttatggctgccgaaaagctgaggacagtaagtttgttctagagaggtatgagctcccctgaggttagtcaagaccaagtctggtggaggcctcattagtcctaggagcctggtgtcagacaaatccggaagagccccaaggcacagcgggccctccaggtcctcctgcctgggtctgggctgcaggaagggcaggattccaccaccccacagctaacccagaggcaaagctacgctacacaagcggtgagcaggccagcccagctcctcgagaccagcacatcaacccagctgctgacaggagaggggcaagcccttcctgaggcaaaacagtatcccctctgctccttaactgtcttacccacatctagtgcaccctcagaaacacaagacaccatggacaagaacagaatattagtcaacaatggcatcccagggtctctcccagctccaacctatcttagatattccagtcaaatccaatctccctaaagcgtgactctacttcagctaaaaaacacactaaggctccccactgccttcccagtttcagatttcttggcctaagagggaagttgttcctgcactgccctcctgacctctgtgctcaccccacacaaatgggacgctcatgcctctgggtggctgcgcccggcctgcccatgtgctcctccctcttactattccttctccatggggcctgccctgctaccgaaggggaacaagggaccctggcctggccaaccaggaaaccccttctgctcggcagttcctgattcagttatgggcacgagacccaagaacaaattttacccaggagttttgttagaacagttgggcaagatacaggcttcccacagaaatcacagatgtaaggttgtgtgcctggagcttctggtgccatctcagtcgccacaaagggcgctgcccctgagaagaaggtcagttcgggcagcagagaaatagaagcaccgaaacatcataatgtggatggtgactcctgattcctgtttctggaggccctggcatccccggactgggtcttaagagtataactttcgggctgggcacagcggctcacgcctgtcatcccagcactttgggaggccgaggagggcagatcacaaggtcaagagtttgagaccagcctggccaacatggtgaaagcccgtctctactaagaatacaaaaattagccgggcgtggcagcgtgtgcggtgtggtggtgtgcgcctgtaatcccagctactccggaggctgaggcaggagaatcacttaaacctgggaggcaggggttgcagtgaactgagatcacaccactgcactccagcctgggcaacaaagcgagacg[153 bp omitted]tctactaaaaatacaaaaactagccgggcatggtggtgggtgcctgtagtcccagctactcgggaggctgaggcaggacaatatcacttgaacctgggaagtggcagttgctgtgcgccgagttcacgccgctgcactccagcctgggcgatagagcgagacctcgtctcaaaaaaaaaaaaaaaaaaaaaaaagcaaagcaataggatgacaatgatttaaagtaactattattaaaaggttaaagattacagaagaaaagataggggcaaggtgagaaaatggagaatttcagcagaaaaattaaaaacacataagagcacctattaaaatatacaatatgggaaataaaaattttgtgaaacagactaaatagaaatctggaatatcagaaaagaggattggtagcatcaaagacatgtcgatagaaattattcagaggccgggcacactggctcacgcctgtaatcccagtactttgggaggccgaggcaggtggctcacgaggtcaggaattcaagaccagcctggccaatatggtgaaaccccgtgtctactaaaaataaaacaaaaattagccgggtgtggtggcgcacacctataatcccagctactgggaaggctgaggcaggagaatcgcttgaacccaggagatggaggttgcagtgagccgacatcatcgacatcatgccactgcactccagcctgggtgacagagcaagactccgtctcccaaaaaaaaaaaaaaaaaaaagaaattattcaaacagaagcacagagagagagaaaaataaaagagagagctgtgaggcaacaccgagggttgtaacattagtgactggagagactgtgggtcacccatggccatgacaccagtgactggagagactgtgggacacccatggccgtgacaccagtgactggagggactgtgggtcacccatggtcgtgacaccagtgactggcgagactgtgggacacccagggccgtgacaccagtgactggagggactgtgggacacccatggccgtgacaccagtgactggagggactgtgggacacccatggccgtgacaccagtgactggcgagactgtgggacacccagggccgtgacaccagtgactggagagactgtgggtcacccagggccgtgacaccagtgactggagggactgtgggacacccatggcagtgacaccagtgactggagggactgtgggtcacccatggccgtgacaccagtgactggagagactgtgggtcacccatggccgtgacaccagtgacagtgactgtgggacacccatggccgtgacaccagtgactggagggactgtgggacacccatggccgtgacaccagtgacagtgactgtgggtcacccagggccgtgacaccagtgactggagggactgtgggacacccagggccgtgacaccagtgactggagagactgtgggtcacccatggccgtgacaccagtgacagtgactgtgggacacccatggccgtgacaccagtgactggagggactgtgggacacccatggccgtgacaccagtgactggagggactgtgggtcacccagggccgtgacaccagtgactggagggactgtgggacacccagggccgtgacaccagtgactggagggactgtgggtcacccagggccgtgacaccagtgactggagggactgtgggacacccatggccgtgacaccagtgactggagggactgtgggacacccatggccgtgacaccagtgactggagggactgtgggtcacccagggccgtgacaccagtgactggagagactgtgggacacccatggccgtgacaccagtgactggagggactgtgggtcacccagggccgtgacaccagtgactggagagactgtgggacacccatggccgtgacaccagtgactggagggactgtgggtcacccatggccgtgacaccagtgactggagggactgtgggacacccatggccgtgacaccagtgactggagagactgtgggtcacccatggccgtgacaccagtgactggagagactgtgggtcacccatggccgtgacaccagtgacagtgactgtgggacacccatggccgtgacaccagtgactggagactgtgggacacccagggccgtgacaccagtgactggagagactgtgggacacccatggccgtgacaccagtgactggagagactgtgggtcacccatggccgtgacatcagtgactggagagactgtgggtcacccatggccgtgacaccagtgacagtgactgtgggacacccagggccgtgacaccagtgactggagagactgtgggtcacccatggccgtgacatcagtgactggagagactgtgggtcacccatggccgtgacaccagtgacagtgactgtgggacacccatggccgtgacaccagtgactggagagactgtgggacacccatggccgtgacaccagtgactggagagactgtgggacacccatggccgggacaccagtgactggagagactgtgggacacccatggccgtgacaccagtgactggaggctgtgggacacccagggccgtgacaccagtgactgcagagactgtgggacaacacccagggccgtgacaccagtgactggagactgtgggacaacacccagggccgtgacaccagtgactggagggactgtgggacacccatggccgtgacaccagtgactggagggactgtgggtcacccatggccgtgacaccagtgactggagggactgtgggacacccatggccgtgacaccagtgactggagagactgtgggacacccatggccgtgacaccagtgactggagggactgtgggtcacccagggccgtgacaccagtgactggagagactgtgggacacccagggccgtgacaccagtgactggagggactgtgggacacccatggccgtgacaccagtgactggagggactgtgggtcacccagggccgtgacaccagtgactggagagactgtgggacacccatggccgtgacaccagtgactggagggactgtgggtcacccatggccgtgacaccagtgactggagggactgtgggacacccagggccgtgacaccagtgactggagagactgtgggtcacccatggccgtgacaccagtgactggagagactgtgggtcacccatggccgtgacaccagtgacagtgactgtgggacacccatggccgtgacaccagtgactggagagactgtgggacacccatggccgtgacaccagtgactggagagactgtgggtcacccagggccgtgacaccagtgactggagagactgtgggtcacccagggccgtgacaccagtgactgcagagactgtgggacacccatggccgtgacaccagtgactggagactgtgggacacccatggccgtgacaccagtgactggagagactgtgggtcacccagggccgtgacaccagtgactggagactgtgggacacccagggccgtgacaccagtgactggagagactgtgggacacccatggccgtgacaccagtgactggagagactgtgggacacccatggccgtgacaccagtgactggagagactgtgggacacccatggccgtgacaccagtgactggagactgtgggacacccagggccgtgacaccagtgactgcagagactgtgggacaacacccagggccgtgacaccagtgactggagggactgtgggacacccagggccgtgacaccagtgactggagagactgtgggacagcacccaggacagggcacatgtaccaaagacccaaaagacagagtgggacatcagaaaaatttgagaaatactccttcagaaatggaactctaagaaagcaaaagaaaacagaaatatctgcagaaataacagtcaagacttcaaaatctgttaaaatgcacccaccctcaggtcgaagtagctcagtttagaaagctagacccaggtgcatcacaaacggccaaagtccaaaaataaaagaaaatcatgtatatagtcagaagtaagagatttcacagtaaggaaaacagaatgagaaaattcctcatcagaacagtagaaaacagcatgaatagaaccaccttaacatgcgcagagaaaaacacagtccacttagaaccgtatatcctgtaaaaatgcacttcaaaagaggaggaggaattagggccttttgatccacgtaagagctaagcctaggcagaatgtcactgcagaggaactacaaggcaatatatattaaatacggcacttcagactcaaagaaaattatccctcttggcaacacggagtctgaatgaagaacttaagagcgccagaaaggtacgaaaatgtacacatcttcaaaggctatggaaaacaagatcccactacacacctattcgaatggccaaacacaaaatactgacaccaccaaacactggggaggacatgggcctcaggagcgcttactcattgctggtgggagtgaaatggcagcttctcattaaacacggtctcatcacacggtccggcaatcaggtttctttattcatccaaatgggctgaaaagttgtgtcaaaacaaaaacctgcacatgggcgtttacagcagctttatgagtaactgctgaagcttggaagctgctaagatgtctttatgtgtaactgccaaagcttggaagctgctaagatgtctttacgcgtaactgccgaagcttggaagctaagatgtccttcaataggtacgtagataaacaagctgcagcacacgcccaggatggagtatcatccagcgcgaaaaagaaatgagccatcaagccacgaaaagacatggcgaagccttcagtgaatatgaaagaagccaatctcaaaggctacatactgtacgtgtacaccaaagcacatcctcatcagacacctcaatacaccaaagcacatcctcgtcaatacaccaaagcacatcctcatcagactcaatacaccaaagcacatcctcatcagactcaatacaccaaagcacatcctcatcagactcctcaatacaccaaagcacatcctcatcagactcctcaatacaccaaagcacatcctcatcagacacctcaatacaccaaagtacatcctcatcagacacctcagtacaccaaagcacatcctcatcagacacctcaatacaccacagcacatcctcatcagactcaatacaccaaagcacaccctcatcagacacctcaatacaccaaagcacattctcatcagacacctcaatacaccaaagcacatcctcatcagactcaatacaccaaagcacatcctcatcagactcctcaatacaccaaagcacatcctcatcagactcaatacaccaaagcacatcctcatcagactcctcaatacaccaaagcacatcctcatcagactcctcaatacaccaaagcacatcctcatcagactcctcaatacaccaaagcacattctcatcagacacctcaatacaccaaagcacatcctcatcagactcaatacaccaaagcacatcctcatcagactcctcaatacaccaaagcacatcctcatcagacacctcaatacaccaaagtacatcctcatcagacacctcaatacaccacagcacatcctcttcagactcaatacaccaaagcacatcctcatcagactcaatacaccaaagcacatcctcatcagacacctcaatacaccaaagcacatcctcatcagactcaatacaccaaagcacatcctcatcagactcctcaatacaccaaagcacaccctcatcagacacctcaatacaccaaagcacattctcatcagacacctcaatacaccaaagcacatcctcatcagactcaatacaccaaagcacattctcatcagactcaatacaccaaagcacattctcatcagactcaatacaccaaagcacatcctcatcagacacctcaatacaccaaagcacatcctcatcaatacaccaaagcacatcctcatcagactcctcaatacaccaaagcacattctcatcagacacctcaatacaccaaagcacatcctcatcagactcaatacaccaaagcacattctcatcagactcaatacaccaaagcacattctcatcagacacctcaatacaccaaagcacatcctcatcagactcaatacaccaaagcacatcctcatcagactcctcaatacaccaaagcacatcctcatcagactcaatacaccaaagcacattctcatcagacacctcaatacaccaaagcacatcctcatcagactcaatacaccaaagcacattctcatcagactcaatacaccaaagcacattctcatcagacacctcaatacaccaaagcacatcctcatcggactcaatacaccaaagcacatcctcatcagactcctcaatacaccaaagcacatcctcatcagacacctcaatacaccaaagcacaccctcatcagacacctcaatacaccaaagcacattctcatcagtcacctcaatacaccaaagcacatcctcatcagactcaatacaccaaagcacattctcatcagacacctcaatacaccaaagcacatcctcatcagactcaatacaccaaagcacatcctcatcagactcaatacaccaaagcacatcctcatcagacacctcaatacaccaaagcacattctcatcagactcctcaatacaccaaagcacaccctcatcagacacctcaatacaccaaagcacatcctcatcagactgctcaaaaccagtggtactgaaaaatcttcaaagcagttggaggaaaaaaaccaagagaggactgaagatttcctgctggaggcagggcaagctggaagacagaagaccttgcacatctgaagaaaacgtcagcaggctgcggcgctccaatgaaaactcctctatgcccatccccaaacacccaggttgccgagtggctggccctggttctcacagctcctggcacaggctcaccagcaagacccctgactctcccacacccatcatgcaagtggtcctggtccttcaccaatagtccctgaggccaagccacagtcacctcccagctgggggccggccctccccatatcccatcaccatgcatgcccacatttccctcactgatgtggacaatatgcaacccaaccagcctgcac[141 bp omitted]ccatctctacaaaaaatataaaaagtagctgggcatggtggcgggcgcccgtaatcccaggtggcgggcgcctgtaatcccagctactcgggaggctgaggcaggagaatcgcgtgaactcaggaggcggaggttgcagtgagccgagatcgcaccactgcactccagcctggcgacagtgtgagaccctgtctaaaaaaaaaaagcaaaacaaaacaaaaaaacaatgcagacctaaagtggcttccacaccaagaacaaaacttggcctcatgacctactgtccccaccccgcccaacctctgccctctgtgccctcagcttctcctggagacccaggcctctgtcctctgcatctgctgtcacgcctgccaggcctctcggcaaactttcagcaaaggaggcccattctccttcatgtttcagcttaaatatcacttctaggaggctgccccgaccacctctacccagacgtgggccctcctcacatcccgtcatcgtggccacaattcccttactgacgtgaacaatacgtagcccaccacgtcatgcccccggtgcaccccctcgcccgtgttgctcacgacttatcctggaccctccaagagacatgcaggcccccaagtgagatgacgaggacacctgccgccccagcccccacccgatccaccacaaggcaccccgggcttcaaatcaagtttaataaataaaacagcaaaggggggttcaaggcagttatcacttcacagtgtggtccttggtggggtgagggatggtcgagtccaactcggaaaggggctcgagcacaagaggccggacgacacccggggcagggcgcgccgccgcccacggaggaccccactccaacgtgtaaacagaaacagaaacgaacgagagggccagggaggagggggaccaggactccaagccatcttgctaggaagcttcccacagaaggaagacctgcagggctggggaaacaggctggagtctggcccctgcgtggccagcagggccggctcctccggaggctccctgccttggtaccgggggaggacagcaaaggggatgtaaatcacctgtctcctcaaacccacgcctggggttgctgagggaccccaccccaaccgctcaggatcggggagcagggatggagggggaagaggcaggtgggggtgtaaagtgcggcttttcctgaagtggagacgatggggtgggaaggcgaggctggggtgggggccggacagcgaggtatatggctctgtgccccacggggttggcactgagtagcagctgcccacgacccccagggctggggcagcccgcggccctgccgggtgtggagagacagagccaagcagggagctgagggcgccccggcggaggctgctggtgcggggcagggcgtcctgcccgtctccccgccggggcagtgacgccttccctcgcctctgctggctggaagggactaggtggccggctctgccctgcgtcccaacggcggggtctcttctgtccccggctgcccgacggatcccacgtgcaggcagcggcccggacccgggtggcagtgccgggcgctgacggcgctgggtggggccgtgggtccattctgtgtggacaggggcaagggctcacggcccagccacctcaccccagtcctgacgtgttctgaagcagaaggaggtgctaccccaaggcccggggggtggggaaggggtcaggaagactgacagaggcgggcccagcggcagcgctaagtccagtctgggccgcatacgccgcccgcggccaggagtcagcaggtcatcacgttacagctgcaggggagagaccaagagagacgcagagagtgtcagtgcggccccacgtgcctgcacagcccagtgctgagcgctggactcgagactcccagccttgcctcccccacagcctatggcagccgggcccggggtgccctgaggggagctggtggctggagcaggggtgggacagcctggcacctgctcccatttgtggagaatgtggaccacatgaatgtattctccagtcaaaaaatacatacaagtaaagaataaacctaaagacacactgagagcctgctcgtggagccacactgtcctcgggtccttggggcaaatgcctcccaccctcctctgctcagcctgagggctggggggacctggttggagtgttgcggaggctccgggcatggggtggcactcactgtgacaggggctccgagtgtagcccgggggccgggcacgtggggtgggcggccaggaaggggttcacgtccccaatgccgatgagtccaaactcggtgaccgacaaagccacctgtgctggggccacagtctcctccggatccccgctgaggtccacatggctggagatgaggggcagctccttgggcagggcgaagtccacggccagccttgggctggcgtctggctccggagcagtgacagctggctggtatgaggctgggtcggccagggctgggggccgatgggacaggggtacagcgggggactcatccagctgctggaaggaacacggccctggctccgaggacgggagtccatcagaggccactccgggctcatcgagaccaccggccgtgccatccacgctcagtggatctgtgaaagagaacgcaacagagggtggggcctgcccacagccgcggatcctgtgcaggctcctgcctaactttgctgggtccagcaaagcctgtggatccctccccagaaaagcctccacacaaatacaaaagacaccagttacactgaaatccgcgagccccaggttaagggtctcagctttagaagtagattttagttcatcagaccaacagtgggtcacaacccacatctttaaaaagagcagaatacaatagacataggtgtaaacaatgccgggggcactgcagagggtaaatacagggtctgtggaatacacagacttaggtgtaaacaatgccgggggcgctgcgagggctaatacagggtctttggaagttttgttcccacaggcagcgcaaggggcctcaccacaattctaggaagtagccgaggtggacaccctttggcaaacaaaccatggaaacaaccagactctggaaatgggggaccctcccagactcaaccatctaaacacagagccagaaagcaaaggatcctcgtttgcaccctccccgtgtgggtctccaccttcggacgccacatcagacaccaccatcggacatggtccctacccgaggccctgctgtgctccgtcatggcctcaggtgcaagatcctggcgacggctccggacaccctgtccttcctgagtgtcctggtgacgggctaagtccccaccctggggcaggaaggccctccccggagactgaggcctggtaaataccccaacctcaccatacggggctccccagcagtggggccacatgcacccctccagcaagcccagagggtaagcgtaatccctgccctcccctctcccagccaggtgtacagagcggcatccacatcacgtggctgccctccgccacccagacgcccactcctcctggcgaggctggcccagcacagggcgccaggcaggagaggctccaccgggcctcactcacggctccagacccgtggccgcccccagggcaggagatactccccaagcctcacctgtgcgcatcccagtcagggtgtcttgctccgggcgcggacggccggggccatcggggtcgctgccatccaggtcctggtctgcgtccctgtggggagagggcgccatgaggggcggcagacaggacagacgcccccacccaagaggtgccgcccaggcgcccacgtgcccacccccggcggggtggccgcctgtcgttactgctggggagggctgcacgcacgtggttccggacgggacgtacttcctccggcccagccgcgtctgctgggcgaagtagtcgtagcgctccgacttcttccacaggtagtagtactcgacacactcgcccactgaccgtgtgcgcacctgcggggaggggtcaggagccatctctgtccccggctgcccagccccagcacctgcaccacgatcccaggacgtcctgggaccccgggacagcacagaaggagcacagcacccaccactctcagataacgcaagaccccccgacccatgaccctaacaggccacaggctatgcccaccacagggaacaggggctcggagcactgtggcactgcctcctgtttcaagccccctcagagccctccagctcctggcttgagacccctttcccttctgtagcatcagccagacaaacgtaccctccaggcctctgtctactgctcacccaccccatcccagaccatgagccacgggccagttgcgtccacctcatctgcctgcttctcacaggcccggggtgggagtgggagtgacaacccccgggtccacagactcctggactgagccccttccccgggaggaagaggcacaagcccgcggcgcctgctttcccaccgaacacatccctccagggcccagcgaatgcttcccaagtgcacagaagacaccgcagaaggacacatgggttctgtgaacccgacaaaattcccaacgtagcacataaagggccaaacacacatgcacacaggcttcagggagacgagaagggacacacacacacacacacacaaggcttcagggagacgagaagggacacacacacgcacacaaggcttcagggagacgagaagggacacacacacacacacacacacaaggcttcagggagacgagaagggacacacacacgcacacaaggcttcagggacacgagaagggacacacacacacgcacacaaggcttcagggagacgagaagggacacacacacacacacacaaggcttcagggagacgagaagggacacacacacacacgcacacaaggcttcagggagacgagaagggacacacacgcacacaaggcttcagggacacgagaagggacacacacacacacgcacacaaggcttcagggagacgagaagagacacacacacgcacacaaggcttcagggagacgagaagggacacacacacacacgcacacaaggcttcagggagacgagaagggacacacacacacacgcacacaaggcttcagggacacgagaagggacacacagcaagtgtgttccatgtggcacctggcacagagctgggcgcacacctggcaacacctccaacatctccacccgggaggctcatcccacagagagcttgaggctgtggccactgctggtgatggcggaaaagaccccctcacctggacatgctctgggccaactaacccaccgccacccagaacgaggatgccccatgctcaccgctgcgagaacaacgtggggtcctgcctgggggcgagaccgagacaacctccctgcagggcaaacctcaaacgcacgccacgagggagctcttctgtgaagggccagggtgaaatacgcactggctcaggctgaccaacgtgtgctggctacacacggcccctcgcggctgggccaggacctgcccggagctccagaaacacggccgggagttacaaaaacgcggccctgagctatagaaacacggcccggagctgcagaaacacggcccggagctatagaaacacggccgggagctgcagaaacacagccgggagctatagaaacacagcccggagctatagaaacagcccagagtccagaaacacagcccgaagctccagaaacacagcccagagctatagaaacacggcccggagctataggaacatggcccggagctgtagaaacacagcccggagctacagaaacacggagtccatagaaacacggcccagagtccagaaacacagcctggagctgtagaaacacggccaggagtccagaaacacggcccacaactccagaaacacggcccggagctacagaaacttgacaggggctccaagtgtagcctgggagcaccacactccagccacacctcgccccgctgtctccaatcaaaacaccacgtggtgctggagtctgacaaggacagtccatcgctgctgcgcacggcaccgcacagtcacctgagcaatgtcctgagccgtacaaccagccccgggcaggtgcctcctcacccaagcccttcagtggacgacatcgggccccaaatggagcacggtcccaggacacgaggcagaagcaaggctcggcaacaaggccacagcccactggtcctgaagggactcagtgcccaaccggggcgtggacagaggcggagaagccactggtcagagccatgggaaggttttcagccagagatgtctgactgccaagaggctggcttggaagttaccactcaagaagccacagggcagagggcactgctgcagacatgcagagacccacagaggacgtggggaaggtctaaggaagggcagaaggccccggcacttggcagcacctgcctgtcatgagggtttgtcccgggtggcaggacctgggtccctggaggagggaaccaggagacccctggtctccaggtgtcaggggttctgctgtggggccaatgctggacactgagccagcaggctctgctcagaggacacagacttgaagatgaggtgcccagggccctggggtggaatgtgaggcagaaacaactactagaattcagcttttgccacattctttcccaaagccagagccttgttcttgtggggacaggaaaggggcccacagcagtcagtagcaaaaaatgcagaagacagcaatgggcacacggtgaggaggcggacacaggacacggggctccaggcctccagtcggccgtgtgctgtgtgcctgcggaccctgagcccctccccagatcgagaagcccccggtggagcctggcagtggagtccgcaccttgttggcctggatcaggtgaaagttctttccatgcacacggaagccgtgctcaaagttcctgcactcctcttcactccaagcacagagcccatctgcaaacacggccggggagaacggtcagtggtgcccagggcggggccgcagcggaaggaaggcccaggccggggagaacagtcagcggcgcccagggcggggccgcagcggaaggaaggcccaggccggggagaacggtcagcggcgcccagggcggggccgcagcggaaggaaggcccaggccggggagaacggtcagcagtgcccagggcggggccgcagcggaaggaaggcccagaccgctgctcacctcggatcaccttcacgttgaaccgcagccttcgcagggcctcctccacattgaagttgcatttcaccaactcgtacagcgcctggggagaggacatgttggctcttccatgggctcagcgcaggagccgacagcaagaactgtctataccatccagcgagtggcatcaggggccgtccacaccaccctcctgggcgatgtcagagccacctacacctctatccagggagtgacatcaggggccgtccacaccaccctcctgggcgatgtcagggccacctacacctctatccagggagtgacatcaggggccgtccacaccaccctcctgggcgatgtcagggccacctacacctctatccagggagtgacatcaggggccgtccacaccaccctcctgggcgatgtcagagccacctacacctctatccagggactggcatcaggggccgtccacaccaccctcctgggcgatgtcagggccacctacacctctatccagggagtgacatcaggggccgtccacaccaccctcctgggcgatgtcagggccacctacacctctatccagggagtgacatcaggggccgtccacaccaccctcctgggcgatgtcagggccacctacacctctatccagggagtgacatcaggggccgtccacaccaccctcctgggcaatgtcagggccacctacacctctatccagggagtgacatcaggggccgtccacaccaccctcctgggcgatgtcagggccacctacacctctatccagggagtgacatcaggggccgtccacaccaccctcctgggcgatgtcagggccacctacacctctatccagggagtgacatcaggggccgtccacaccaccctcctgggcgatgtcagggccacctacacctctatccagggactggcatcaggggccgtccacaccaccctcctgggcgatgtcagagccacctacacctctatccagggactggcatcaggggccgtccacaccatcctcctgggcgatgtcagggccacctacacctctatccagggagtgacatcaggggtgtctacatccccttgcaggatacccggaggcgtctacacctcctccctgatacgtggttttaattggccccccttctgacctgagtagctgttccagtgccctggcccccacacacctgacccctgccctcccctctgccctccctggcccctggaggcactggggtgtgagctctggcccacgccacggcagccctcagcccctctgtccccggcatggcagcccccacctgctcactgtctttcacggcttctccctctgggagctgaggcccggccatctcgtgccaacgccgcttcaccgccctgtacaggaactcctccacctccctctcagggaggacgctggggtcccagagcagctggtcttcgttctcgtagactgcacaagcagagggcaaaggtcagcttgcaggaacccaatctgcacccacacacgccaggacaagcaaagcagccaactcagcccctgacagggaggaggcactgtccgtcctccctttcccaagccctgggccgccatccctgtgctcctcctgggcttggtgctgctgtgctcaattcaactaccgagtgggtccagagcaggctctgggcaccacacacaggcctgtatcccaacgaccaagtgcagggagccatgagcagtcagcaggggcgcctgatccagccaaggggtcagaggaagctgtggacagcctagatctggggcaggggaattctaagcaaggactctgcagagggggttctaagtagtgagaccagtgaggtgaggctggcttcaggctgcacagctacaagggcacctgaaatgcagaggcctgagggagcagcaaggacgcccccgactctgcataaaggcagctgagacttgggcccgtggacaagcgggagcccccacagttaggcactgtcgcgctctaaccctgggagctgaagagccacggccagaaggtgcatcacctctggggagacatcctgcccccggtagctggtgtggatggcagatgtgctcacagaggggaggaaaagtccacgacctcagatgcaattggctttcggcaaagggagggacgcagcctccagctgtggtgagggacgtgactggggacaaggcaggggagagctcagggccaggtctggcaaggctcaagtgccagcacctctcaattatccaggaaagaggcacaggatcccaaacaaagcaaaccaacaaataaaaaacaaaatcagtgcacgggaagaaatgtgaaaaacgcactggggaaaacagctccacacgggagtctccactgccgggggctgacgcggtaactagctcccaggttggtgctgtgccccaccaagcaggggcctctcccggtcctcatggccatgaggaaaacaggcagacaccacagccacctttctccatctccacaggcgacacctgagccctgcttggacagaggtggtctccaagaaaacagcagaccatctctggagaaaaagaacaccacatacagcctagcatgtgaagggtgggaaaacacgagggaaaaacattaaccggatgtgagggctcatgtctgtaatcccagcactctgggaggctgaggtgggaggatcggttgaggccagagtttgagactcgcacactccatctctacaaaaaatttcaaatgtagtacaggcacgtctgtagtcccagctacggtgggattgaggctaaggtgggactgagcccaggaggtcgaggttgcaatgagccatgattgcaccactgcactccagcctgggaaacagagcaagaccctgtctcagaataaaacaagaaaacaaggccaggcgtggtggctcacgcctgtcatcccagcactttgggaggctgaggcgggcgggtcacctgaggtcaggagttcgagaccagcctggcaaacatggcgaaaccccagctctactaaaaatacaaaaattagccgggcgtggtcatgggcgcctgtaatctccgctactcgggaggc[131 bp omitted]acaacaaagcaggtctacacacagccgatgttaagagtcagcacacgaagacttcaatctaacgaggattaatacgttaaggaaatggacaaaacgccggagagtctcagcagagacttgaaatttatagaaaagaatctcaaggaccttccaggactggataatacaatacccgaatggacccactgaacagcttttttaccagcagcctgaacacagcacaaaacacaattagtggaatcaaaaggaaaccaatgtttacaagaccaaaaccaaagtgtaaaaggaaagaacaccgtttagggtagtacaagacagtgaggcaacctctaagatacgtgtaaatgagtgacagagaaagcaaagaaggaggcagcacaaaatctgaagaggtaacagccaagaattcttcaaaactgacgactgataccaacccacagagccaggaaactcaggacgaatacaaggacacacgaagacgtgtgcacaggcacaggagagccaaactggtgaaaaacaaacaaataaaggaaaggaaacaactcttaggagagaaaagggcacaatgacttcagaagaaagagtaagaccgtcctctgacttctcaacagaaacgatgacagccaaaacgcaatggagtgaaatttttcaagtgttgaaagaaaacaccctgcaaacctggaaaaacatgccatgaaaatatgctttaaagaatgaaagcaaaaatccaggcttttcagacaaaaaaatgctgaaagaaagcacaaggcctattacaaaggaagttcttccggctgaaggaaatgattccaaatggaagctggaggaaatatgtggataggataaatacaaagaatgttcactgtttaaaacaacaatgttatcatcttgtgatatgtagattttttttttttggagatggagtcttgctctgtcccccaggctggagtgcagtggtgcgatcttggctcactgcaacctccatctccggggttcaagcgattctcctgcctcagcctcccgagtagctgggactacaggtgcccaccacgcctggctaatttttgtatttttagtagacacagggtttcaccatgttggccaggctggtctcaaattcctgacctcaggcaatctgcctgcctcggcctcccaaagtgctcggattataggcatgagccaccacagccggctcatatgtaaaattaacgatagcacaaaaggcagggggcaggtaaattgagttaaactgtttcttgcattgtaggggaactagaatgtacttatttcaagctgtgaggcccggtgtggtggctcactcctgtaatgtcagcactttgggaggctgaggtcactggaggtcaggagttcaagaccagcatagccaacacagtgacacctcatccctactaaaaatacaaaaattagctggggatggtggcgtgtgcctgtagtcccacctacttgggaggctgaggcaggagaatcgcttgagcccaggaggcggaggttgcaatgagccgagatcacaccactgtactccagcctgggcgacagaacaagactctatctcaaaaaaaatgtagactgtgataagtcaataattcatgttgtaacctctaaagcgctaaaactaaaacttataagctgaaacagaaggacaaaataaacctattaa[181 bp omitted]cggtggcgggcacctgtaatcccagcactttgggaggctgaggcgggcggatcacgaggtcaggagatcgagaccacccgggctaacacggtgaaacctcgtctctactaaaaatacaaaacattagccgggagtcatggcgggtgcctgtagtcccagctactcaggaggctgaagcaggagaatggcgtgaacccgggaggcggagcttgcagtgagctgagatcgcgccactgcactccaacctgggtgacaaagcgagactctgtctcagaaaaaataaataaataaataaataaataaataaataaaataaaaatacaaaattagccaggcatggtggcggatgcgtgtaatcccagctacttgggaggctaaggtaggagaatcacttgaacccgggaggtggaggttgccgtgaagtaagatcgcatcactgcactccagcctgggcaatgagagtgagactctgtctcaaaaaaaaaaaaaaaaacaaacaaacaaaaaacaaagaacagatggaacacacagaaagcaaagagcaagatggtggcattacacaattgttttataattacatgacatacaagtgatttaaaaaatgtacatggactaaaaagtctattaaaagacaatggttttctcagacaattaaaaataagatctaggtcggacacagtggctcacacctataatcccagcacattgggaggccgaagtgggcaggtcacttgaggtctagagattgagaccagcctggccaacatggtgaaaccccatctctactaaaaatacaaaacttagctgggcatggtggcggacgcctgtaattgcagctacttgggaggcagagggggaagaattgcttgaacccgggaggcggaggctgcagtgagtggatattatgccaatgcactccagagactccgtctcaaaaaacaagatctaaacatgtgccatttacagaaaatacacttcaaatataggaatctagaatggaaaaaagaatgggaaaaaaccatgcaaacactaaacaaatcaacaaaaagctgctgtggtcacactgatggcagattaagtacttatttacggtaagaagtgttactacagagagacacgtcacaatggtaaaagaaacaattcaacacaaagacaaagcaatcttaacgtgtatgcacttaacacaatgtgaagtaaaaatggacagcattaaaaaggggaaatagacaatccacaatcagaggaggtcattaacaatctttcagtaaatagaacaagcagccaaaaaaattaagtgagaatacagatgatgtgaacaacaattatccagcggatccaagggaatacacggaaaattccacccaacaacagcacagcacactctcttcaaacacgtacaacatttaccaaaacagatcaaataatggacataaagcgaggtgcaactaattacaaagaactgaaatcacggagtatgttttctgaccacagtgtaattcaattaaaaatcagtaaaaggaggctgggcgcggtggctcacacctgtaatcccaacactttgggaggccgaggcgggcagatcatgaggtcaggagatccagaccatcctggctaacacagtgaaaccccgtctctactaaaaaatacaaaaaactagccgggcgtggtggtgggcgcctatagtcccagctacttgggaggctgagacaggagaatggcgtgaacccaggaggcggagcttgcagtgaacagagttcacgccactgcactccagcctgggccacaggtgagactctgtctcaaaaaaaaaaaaaaaatcagtaaaaaggctgggtgctggttcatgcctgtaatcccagctctttgggaggccaaggtgggtggatcacctgaggtcaggagtttgagaccagcctggccaacatggtgaaaccccatctctactaacaatacaaaaattagctaggcgtggtggcgggcgcctgtagtcccagctactcaggaggctgcggcaggagaatcgtttgaaccttggaggcgaagtttccagtgagtcaatattgcaccactgaactccagcctgggcaatagagcgagaccctgtcacacacacacacaaaaagtaaaaaacagaaatccagcaacagggagacatgaacaaggctaaagttagtcctttgtaaagagtaatacaattgataaaactttttgtttttgtttttgagacggagtctcgctctgtcacccaggctggagtgcaatggcgaaatcttggctcactgcaaccgctgcctcccgggttcaagtgattctcctgcctcagcctctccagtagctgggactacagttgcgtgccaccacgctcagctaatttttgtatttttagtagcgacagggtttcaccatgttggtcaggctgttctcaaactcctggcctcgtgatccgcccaccccagcctcccaaagtgctgggattaaaggcatgagcccccactcctggcctctcacatcttaaagaataattcctccagaggttaggaaaaaggcacacttccaaacacattcacgaaagcagcataactctggtaccaaaaccagacacggacaaataaaaataaaaggacaggccagtacctccatgaacatacatgcaaaaatcataaatgtgagcacatcaaactgaggagggaagggattaaatacgtatatgttgattttcattaatccaggtgctcacagcgagcatgtaatcactgcaccaggggatacacagcattttcatcaagcaatcaatacataaacttgtttcaggtgtccacttaaagacgccttactgcaggccgggtgcagtggctcatgagtgtaatcccggcactctggggggctgaggcggacagatcacttgaggccaggagtttgagaccagcctgggcaacaagatgaagcctggtctctacaaaataaacaaaaaaaaaattagccggcgtgcagtggcgcacatctgtagtcccagctactcgggagactgcagcacgagaatcacttgagcccgggagcagaggttgcagtgagccaagattgcgccacggcactccagcctgagcgacagagcaagactttgtccaaaaaactaaatagatagatagataaataaataaaatttaaatttaaaaaatagatacgtaaataaaatttaaattaaaaataaataaataaaatttaaattttaaaaaatgtgtcattgcaggggttcccaacccccaggccacagctggccgcacagcaggaggtgagcggcaggagagccagcatcactgcctgactccgcctcctgtcagatcagtggtggcattagattctcataggagcgcaaatcccactgtgaactgcacacaccagggaggcaggcagcacactccttatgagaatctaatgcctgatgatctgaggtggaacggtttcctcctgaaaccacgccccctactccaacatccgtggaaaaattgtcttccacgaaaccagtccctggtgccaaaaaaggttgggagccactgtctcactggatctgccttgtggattcactaacactgaactcacggccagcagccccagagcttgcgcctgagtggagcttctcgaattttctctgaaagggacatcatagccttcttccacctaagaacaccagacagaacgtcggcactacatttaggggccactttaatccgtcaagtagccgacacaaggcacaaggatgtgaaaaacggcattcagtacacggcaggaaaggcacgtgctcacagtaaaagatctgagagccaagacagagcagcagcttgtcccacctcagctggaactgtacgtcaggtaactcgccttcactgacactctacacacatctgctggcgcctgaccgtaaaggtgttgcgagttttgatttgcggtttcaaataaattttaccaagtaggcaattcaccagcacagaacccacaaataatgaggactgagtgcatgagatacatacacacaagagagaacacttcatggccaggaagcacgtttattccaccgtgcaccgttaacttaacgtttgaaaatcaatttatgggccgggcgcaggggctcacacctgtaatcccggcactttgggaggccaaggcaggcggatcacctgaggttgggagttcgagatcagcttggccaacatggtgaaaccccatctccgctaaaaatacaaaaatgagccaggcgtggtggcgggtgcctgtactcccagttacttgggaggctgagtgggagaactgcttgaatccaggaggcggaggttgtggtgagctgagattatgccactgcactccagcctgggcaacagagcaagactccatctcaaaaaaaaaagattaaaacttgtcagttgctgaaaaaaataagttttaatcttaaaacttacatagatatgcaatgaaaacttacaaagttagaagacttgcaccacctcagacttccttgtaacctgtaataactgagacagtggcgatgactccgggtgagacaagacacaccttacaggcacctgatttaccacaaaggcgtcactgcagctcagtgggggagacaatggacttttgttgtttttatttttatttttatttttattttttatttttgagacagagtctcgctctgtcacccaggctggagtgcagtggcgcgatctcggctcactgcaagctccgcctcccgggttcacgccattctcctgcctc[212 bp omitted]atcacagccttaaatgtgaaaggaaaaacaataaatcttctagaaagaaacgtggaagaatatctccaagagcctgaggtaagcaaacactccttaagtagaacacacacacacattattattcaaataatgattgataagttggactttattaaaattaaagacatcactaagagagtcaatgggcaaaccacaaactggagaaaacagcagcagtgcacaaagcccagaaagacttgtttccacaaaatgtgaatgactacaaatcagaaagggaaagacaacaaaatgggagaaagcttggagcacgcaaagagagaatatccaaatggccagtacacctgcgaaaggtgctcaccagggaaatgccaattaaaaccacaatgggacaggagtccatatccaccagacgggctaaaattcaggcaaattcaccctcagtggcaaacaccgagaatgtggagcaactcccacaaatcattagtgagaaactcaagcagtatgcgtcaccctaagcacacacctcccacacgactccccgctgtccatcaagtgccgagtgcctatgtccactaacgacgcacacgagggcattcacagcccacagctgaaccaaccatgaccgcagcccatggcagaaagggtgggtaaatgtggcatccaaaccaaggaccacgatgcaacacacaagacacacacaaccacggcatccaaaccaaggaccacaatggaacacacaagagactcaaaaaccatggcatccaaaccaaggaccacaacgcaatacacaagacacacacaaccacacagacaactcaaatgacagacgtcatcacaatgcaatacacacgacacacacaaccacgcagacgactcgaatgacacaggcgtcatcacaatgcaatacacaggacacaaccacacagatgactcaaatgacacagacgtcatcacaatgcaatatacaagacacacacaaccacgcagacaactcgaatgatacagtcgtcatcataatgcaatacacaagacacacacaaccacggcatccaaaccaaggaccacaacgcaatacacaagacacatacaaccacgcagacgactcgaatgacacagacatcatcacaatgcagtaaagacacacacaaccacacagatgactcaaagaacagacatcatcacaatgcaatacacaggacacacacacacaaccatgcagacgactcgaatgacacaggcatcatcacaatgcaatacacaggatacaaccacacagacgactcaaatgacacagacgtcatcacaatgcaatacacacacaaccatgcagatgactcaaatgacagacatcatcaccatgcaatacacaagacacacacaaccatggcatccaaaccaaggaccacaatggaacacacaagactcaaaaaccacagcatccaaaccaaggaccacaatgcaatacacaagacacacgcaaccacacagacaactcaaacgacacagacgtcatcacaatgcaatacacaggacacacacaaccacagacaactcgaatgacacagacgtcatcacaatgcaatacacaagacacacaaaaccacacagacaactcgaatgacacaggcgtcatcacaatgcaatacacaagacacacacaaccacacagacgactcgaaggacataggcgtcatcacaatgcaataaagacacacacaaccacacagacgactcgaatgacacagacgtcatcaccatgcaacacacaggacacacacaaccacgcagacgactcgaaggacacaggcgtcatcacaatgcaatacacaagacacacacaaccacgcagacgactcaaaggacataggcgtcatcacaatgcaataaagacacaaccacacagacgactcgaatgacacaggcgtcatcacaatgcaatacacaggacacacacaaccacgcagacgactcgaatgacacagacgtcatcacaatgcaatacacaagacacacacaaccacgcagacaactcgaatgacacaggtgtcatcacaatgcaatacacaagacacacacaaccacgcagacaactcgaatgacacagacgtcatcacaatgcaatacacaggacacacacaaccacacagacgactcgaatgacacaggcgtcatcacaatgcaataaagacacacacaaccacgcagacgactcgaatgacacagacgtcatcacaatgcaatacacaagacacacacaaccacgcagatgactcgaaggacacagacgtcatcacaatgcaataaagacacacacaaccacacagacgactcgaatgacacagacgtcatcacaatgcaatacacaagacacacacaaccacgcagacgactcgaatgacacagacgtcatcacaatgcaatacacaggacacacacaaccacgcagacgactcgaatgacacaggtgtcataccgagtgggaggggccagctggcatcccatgggacgaagaagtcctggctgctccagacagggcaccctcatggggggtgagtcagggtggggaaagggccctgatgacagactccaaagccagggtttctgggtgagggtcccaagtgtcccctccgaccctgccttctggatgtcccagcagcttggctgcaccttcctggctccgtcctcttctcacacggggcacccccgaccagccccaggaggacgacttctcttcacggagggtccctgtctccctggactcagtacttctgctgcacctgtcccttcccaccacgcatctcagccactgaatcaccttggagaaggctcctgagctaggagcactggcccagggcctgcaagggctccagggcaacacaaatgagacccaagtcaatgggcacgtgactccacgcctcaaaggggcaagagagggtcgattttgaactctagtgggaaagagacgaaggtcaagcccaggaaagggagcaccctgaagaggagcggagcaaggccgggggtgcagcgcagcatccggcgggtctctggagaaccatctaacccggcacagagccatcgaatgcagcggcccaggctgtggggaggcggctggagtcaagggcagggcagggctgggtcagaggcaggacgggctgctgagggtctggctgcacaggctgaccagagcagaccccaagggagggacagagctgggcaggggcaggcagcaataggcccactgcagccacgagagcctcccacctcctccagccacaggctcagctgccccagtgagcgatgcggggcggggacctgaccagactgtccaaggatctgacgtccagccaggccactccccttgcagaagtgggtttcgcctcctctccccaggccctacttactcttctcacagtgccggttcaagtgcaggttgctgaggtcagcttggaactgaggtcccaccatgatctcctgcaaagcaagcacctgggaatcaggacactgaggagcatctaggccgggcgggaggctggctgcagcgtgctgtggcaggcttacggggaggggccactgtccagaccccagacccatctgtgccgtctacctgctgatgcccagttctggggtctgaaggtgggaggcagaggcctgggtgtgtgaggggtgaggctgtgtcctgacgcctggcctggcagaggcccagacaggatgtcggaggacaaacactctgggtcagcagcaggggcccaggctccggtccaaagcacctgtggccggtcccagcccaccctggggtcgagcagcacgtccctcctctgagaaggggcacaaacccagggagagggctcagcaggacccggctgcggttactgaggccgagataccaggttggggagagggcagagccatgggagggatgccaggttggggacacggcagaaccacggctgggatgccaggttggagacacagcagagccacggtcgggatgccaggttggggacacagcagagccacggttgggatgccagtttggggagacggcagaaccacagtccggatgccaggttggggacacggcagagccacggccgggatgccaggttggggacacggcagagccacggccgggatgccaggttggggacacggcagagccacggccgggatgccaggctggggagacggcagagccacggtcgggatgccaggttggggagacggcagaaccacggccgggatgccaggttggggagatggcagaaccacgtaccttcttacatttgttggcaggaagagagtcctcctcggtgtcggaggaggcagaagagccaggctctctgtcttcatcagccaggaaacgagctttgggaaaacagaggcaggtcccccagggtctccactgcctgcagcctatacaaccccttctctccactcccattctccatccacctgatccccaggccataaccctctctctggccagacattgggtaaacagatgggcacaggacccaggaccagggatgcacctttgaagaaagaggccttcccttctatgcagctgctgcacctctgggccccgagccctcagttcccaggaaagccagcacagaggcttgtgaaggaggccggttctgggaatgctgtccctggatctgctaggggaaccaacatgttccctacttgtttaaaccaaatcgctctgagagtccaggctcactggccagcgtggaggagaacaaagcacccccagggctactgacgcttcccgccaggcagacgccctcatctgtgatgagttcttggcctgcatcagcccaaggacccttcatcaagcatcacgactgcctggcagggggcctggctgcggtggagtatggggacagagtcacctacatccactccggttagggaagaggtcggaggcctcgtgggaggtcacggacggggtgaggtcgtcagcagatgattgcgtctcttcctcttcttcccctgaaagcaaatccttcgctatttgttcctttaaaaaaaaaaaaaaaagtaaagaacattttacagtttaacaatctcgcaataccactaatgataacaacagtaaagacactgggagtgccctgaggctcacatggggctgctattcccattctgcaaagggtgcacagcgtggggggagcggggatgggaaggagacacgtgggagcccacacccagccaccagagctggagacagttagagctgccactgggcacacgcccggagtgcatggctctttctctgactgtgcatttggttttaaccttctacaatgcagcccgcccctgctcccaacacccaagccttgacctgtgacctctgggtacggaatggcagagagaccagtcctggggaggccccgatgtgcccctccacccaccaaagccagaatgacatgtggcctggggttaaggctagggtccagccccatgcccatggccattccaaccccagggtagtggtcacaggtacattctacttattctgggggcctttgtgcctcctctcactgaacactcccctctgcagagaggcagcgccaggcccccccaccttcagctgtgagccagttccaggaagggccctcacttactttgtccagggtcatgtctgggaggttcggggccacgtcaccaccctcactctcccggtctgaaatggggtctgacgcctcgtagccatagagcgcaagcagctcatcaaagggcatgtcgttgctctgagttggggaagggaacaaggccccatcaggagggacggctctgggggttcctgtccctgtcctcttgcctgagcctcactggccacaaccagggccactctgtcacacccatagcaactccccacatggcagcactccccagccagacctcaggcccagtccttcatccaagagctcctttacaatccctcagaggcaccagagcctaggggtcaccggccagggaagagggcaccaccctgcccacaatgcctccttgcacagggtgaattacaggaatacaaggatggtgtgacacagggtgaattacaggaatacaaggatggtgcgacacctggcaatttactattgtaactcaacatcaatatattaaaggggaaaaaagttatctgaaaaaggcatttggtaaaatccgacatctattcctgatttgaaaaaaaaaaaaaaggaactctcagaaaactacataaacaggccagacacagtagttcacacctgtaatcccagcattttggaaggctacagcaggcagatcacttgaggccaggagttcgagaccagcctgggcaacatggcgaaatcccgtctccactaaaaatacaaaaattagctgtgcttggtggcatccacctgtagtctcagctactcaagaggctgaagcacgagaatcacttgtactcgggagatggaggttgcagtgagccaagatcacaccactgcactccagcctgggtggcagagtgagaatctgtctcaaaataaaaaaaaagaagaaaactatgtaaacggatgcttcatcaatataatggagaagctgtcaattcacactcagtcaaaaatgggtaaccagagcagcccccatcacgatctggaacaagagcactgtgattaacgaacactgttttgatgctctgagccaatgtaatatgacaagaagtataaataaggcacgtaattcctgggaaggaagagatgcgaactatcaacatcatgctctccagtgctgctttcaaatccttctgtcctcccttgtgtgagcctctattccacagaggctagtcctgtctgctcagactccacgctgatccctgtgggtcactttcagcttccaacttccggaacactccctctcattctctcaagatgttagcactggcctcccctccaccccagctcctgcccagactcaacctgggggcttcaagtccacatagaaacctcccagcctagtcccagcccttctccaggtggaatatctacactgagtcccccttttgttctctcacaggaccccgtggaaagaacagattctgtatgtccattaccttcaggattatgaaggtgggaaggttgacacagtggtccagaggcccttgggttgcctgaacctctccatagtagcccaaggtgaagaccctttcctaagagcactcagccgtgacttccatttttggcttcattgaggcttgcactgatagtgcagcattggcagccggcaagagcccagtgcccgtggaagctgcagccagtgcatccctgcccacaagtcactgctgtcacattcctcacagaccaaaagcaaacaccccagcttcacttcagaagatgctggacagccgggcaggatggctcatgcctgtaatcccagcactttgggaggctgaggcaggcggatcacgagatcaggagtttgagaccagcctaactaacatggagaaaccctgtctctactaaaatacaaaaattagctggggatggtggtgggttcctgtaatcccagggagaatcgcttgaacctaggaggcagaggttgcagtgagccgacattgtgctactgcactccagcctaggtgacgagagcaatactccgtctcaaaaaaaaaaaaaaaaaaaaagaagatgctggacaaagtgagcattttgttaagtctcaccctgagcagatgtttccatgtgctgtgagggcgtgggaagcatgcagaatgcacctgctgcataccaaagtgaggtggttccttcaaggaaccacatgcatggaacgagtggtgagacgaagaggctgttcctggtcgtttcacctgaaagaatgctggccaactatagccactcagaaaggcacctggcaggcgctgccttgtatgcaagccaggggggctgttactgcaaaggaaacagctgaccataactgctgcaatggtaaaactcaagattttgaaaaacttgggtttgac[133 bp omitted]gaacatgatgaaaccccgtctctactaaaaaaaatacaaaaaattagccaggcaaggtggcaggtgcctgtagtcccagttactcgggaggc[134 bp omitted]aggctggtggtgatatcaactgttacagtcaaccctaagccccaacatgactatatttggagacggggcatttacagaggtaattaaggttcaaggaggccgtgagggtggggccctgatccaacaggattagtgtcctttcaagaaaaacaccagaaggctccctcttgttctctatccaccatgtgaggacacagcaagccaagaagagagccggcaccagaacccactctgctggaccttgatcatggacctttctgcctcttgacctgtgaggttcactgatacggtctcagattccactccacaactactctctacaaaactatcacttgatgggttttgctgtagcatcaaagaagaatacccacaattatccgaaaagctgtgaaatactcctacctttttcaaccacagatctggctgaggctgtattttaacttcagccataagagcctatcacaacagatcaatgtctcccttaaaagacagaaactgaccaggcgtggctcatgcctgtaatccaagcattttgggaggctgagatggcaggatcaacttgaggtcaggagttcgagaccagcctggccaacatggtaaaacctcgtctctactaaaaatacaagttagccaggcatggtggtgggcacctgtagtcccagctactcaggaggctaaggcacgagaatcacttgaacccaagaggtagaggttccagtgagcccagattgcaccactgaactccagtctgggcaacagagtgagactctgtccccagaaaaaaaaaaaaaagacagaaactgggtcaggtacagtggctcacacctatactcccaacactttgggagacctaggtagaaaaattgcttgaggccaacagtttgagaccaaccctagcaacatagcaagaactccacaaagaaataaaataaaaacgttggtgaggtgtggtggcgtgcgactatagtcccagttattcaggaggctgaggcaggagcatcccttgagcccaggagttcgaggctgcagtaaactatgattgcaccactgcactccagcctaggcaaaagtgagatccagtctcaaaaaaataaataaatgttttaaagacagaagcttggccaggcgtggtggctcatgcctgtaatccagcactttgggaggccgaggtgggcagatcacaaggtcaagagtttgagaccagcctgtccaacatgatgaaaccccgtctctgctaaaaatacaaaaatttgccgggcgtggtggcatgcacctgtggtcccagctactcgggaggctgaggtaggagaatcacttgagcccaggaggcggaggatgcagtgagccaagatcacaccactgcactccagcctgggaaacagagcaagactccatctcaaaaaaataaaaagacagaagctggattttcatatttgcttctacattcaaagagatatggaaaactaaaaattcagtcttctaattttttttcttttgggacagttctttttattttcataaaaatatttatattaacatgtcactgatttattcagcctcctgagtagctaggactacagacgtgcaccaccacgcctggcaattttcgtattctttttttttcttgagatggagtttcactgtgtcactcaggctggactgcagtggcacatctcagctcattttaaaatgagttagcgaataagtatttttacatgtcaattttttttgtttttttgagacacagtcttgctctgtcccccaggctagagtgcaatggcctgatctcggctcactgcaacctccgcctcctgggttcaagcgattctcctgcct[134 bp omitted]cagcctcccaaagtgctgggattacaagcatgagccaccgcgcccaacaatttttgtatttttagtacagacagggttt[132 bp omitted]aataaaaaagcaatagataaagcacattaacaaagctccttgaaactctaattttttttaatttttttttttgagacagggtctcactctgtcgcccaggctggagtgcaatggcgtgatctcggctcaccgcaacctccgcctcccaggttcaagggattctcctgcctcagcctcccgagtagctgggactatagacgtgcaccaccacgcctggctaattttgtattcttttttttcttttttggagacggagtctcgctgtgtcacccaggctggagtgcagtggcacgatctcagctcactgcaagctccgtctcccgggttcacgtcattctcccgcctcagcct[134 bp omitted]cagcctcccaaagtgctgggattacaagcatgagccaccgcgcccaacaatttttgtatttttagtacagacagggttt[132 bp omitted]aataaaaaagcaatagataaagcacattaacaaagctccttgaaactctaattttttttaatttttttttttgagacagggtctcactctgtcgcccaggctggagtgcaatggcgtgatctcggctcaccgcaacctccgcctcccaggttcaagggattctcctgcctcagcctcccgagtagctgggactatagacgtgcaccaccacgcctggctaattttgtattcttttttttcttttttggagacggagtctcgctgtgtcacccaggctggagtgcagtggcacgatctcagctcactgcaagctccgtctcccgggttcacgtcattctcccgcctcagcctcccgagtagctgggactacagtcacccgccactatgcccggctaattttgtttttgtatttttagtagagacagggttt[131 bp omitted]caccatgttggccaagctggtctcgaactcctgatctcaagtgatccacccgcctcagcctcccaaagtgctgggattacaagcgtgagccactgcacccagcctgaaactctcaataatttttaagagtacaaagcaggttctgagaccagaagatttgagagcagctggcttaatccttgaccaccgtgctgctcagagagccccatgaaagacctggtctccactgaatttcagctactaggacagcatctggcactttgcaaaaagatgtacaatttagcacttaccaatgtggaatctgagctgcacaaaactcatgaggcttaccccggagggctccacccaacacaggggcaggatcaccttggccaagtacctgggagatgaagtccttctccagctcctccttgggcttgtctgggcacctcgaggcctcctcgcactcccccctaacactgtagttctgtgacaggatctctgcgaggttgaactgatggtctccagagcccatggacaccactggggagaagagagcagcccaggtgagcaccgtgcctcgcctgtcccaaccatcctgccgagactactgacgcctggtgaagccctaaggatgaggccctctgcatgctgccaggatcagcctcatgagggaacccaacaggacaccccacgactaatgcacacaggagcacggctggtgagctgcacatacaaattccaaggatttttttggggggtgggtgtgtctctttctgagagactgcttgtcttcctgaacacagagaagcctgcgaggatttggggagcaagtggactagaaagagaccaacacccatctcgttagggtagaaggagcagcaggactcagtcgaggtgggttcacaccggactccatgactcctgaaacgggggtgacgctgaaccctcacctgcacaggtcagtacagcatcaaggagcatgcagggacaaaccaatgggggctcgacaacaccagtcccttaagctccgtctgcagggccacatgaagaagacatgcgatgtacatggcccaacagttgacggctgtcatcagatccagggtttccccgaaagaactgggatgtgtcaccattcctctgcatgtttactctccaattggtcaaatttttaaacaaacaaaggaaatagctagggctcaatcaatccagacagagagcagtgtaggccaaggctgggggcctgagggcctgggagtccagggcacgaggcctctagggcagccacacagcctgtagggctgggcacacaggtgtgcaccacacacagcccatgcacagaacatgcagctgcagggcacagaggacccccagcggcaggcacctcgttagagtgagggaatgacctggagctgaatgggtgcgcccggaccctcagtggccaccgcacccttggaggagccacgtgagggaaaacagggatggcaccgccttctctggggactcgggtggtgactagtttgatacggaaagagacgcagccctacacctggcagaaggagcccagccaggggaagaacagtcatagagacccttgccctacagcgtcagctcctccccgcaggcccaacgcaggtggctggcaggcgggcatgggaccttgatgcccactgggcaagcagcagcgcagggaggtgcagggaacccggggtgctgcctgtctcgccgccctccaccttctcagccccggctccctcagcaagccaccccttcccaacaccctggcaagatgaggcagccctcagctcggtgcaggcgtgtgcccgggtcctctgctgggggtgctgggctctgaggatggtcttgggtcgcctgggctccctgcccctgctaaagaacaggaagacgggagtcctgaccactctgccccacagctccatctgaacgggtgggagctgggacaccctggactctggaagccagtgtgccggtccacagctcagccaggcccagcaggcattctgtctctcacagccacaaaggccttggcggacctgagcaggggaaggagggaggaaggtacctgctgttgtctgcaagcccggctcccctgggcacaggctgtgctcgaggcaggagaccacgcgaggactctgcctccccagcgaggaggcctgcgaaggaagagaggcagggttagctcggccggcccaaaacctgctgctggacatcacagtgtggcagccaagagcaagcgctggtcagagcccagtccccagtgaccagggaaggggctttgtctccgcctctgagggctggggggcactaggagcagcacacgcatgtggccgccactcgccccgcctcccaccaaggaccgctcacagggtggaggcgttctcgcccagggcaggacatgcatcatgtgacactgaaaactgcccacacacaggcctacagtcctgacccatgctgcaacctggatgaagctcaacaacagcatgcactgggagggaagccagacaccaacggccacagcgtagggtccactgataccaaacatccagaacaggccagtccacagacagaatgggggctcgtgggggccaggagccagggagagagacagtgggagagtgactgctaacggggacagggcttcttttggggatgacagaatgttttagaatcagatagaggtgatggttgcatggtcgtgaatacactaaaaatcaatgaattataaactttaaaatgggcatattttatggtttgtcaattacaatttttttttataaaaaggcaaacaaaaccattataagtt[132 bp omitted]ccttagcctcccgagtagctaggactacaggtgcgcaccaccacgcccagctaatttctgtatttttactagagatgagggtttcaccatgttgcccaggctggtctcaaactcttgacctcaagtgatccgcccgcctcggcctcccaaagtgctggcattatgggtgtgagctaccgcaagccacgatatctctcatgtacataaacacaaaaccctcaacaaaatactagcaaactgaatccagcaacacataaagatgattataagccacgaccaagtaagatttaccgcagggatgcaaggtcgatttaatatccaaaagtcaattaatataatacatcacatcaataaaataaaaaaacaaaacacaggatcatctcaacatacccaatccaacaaaatccaacatactttcataaggaaaaatacccaacaaactcagaacagaagggagcttccttcttggaaaaacccatacttatcattgccctcaatggggaaaggctgctttctccttcacaccatgagcaccacaacgtgtactctcacctctcatgctaaatggagggctggatggtgtagtca[138 bp omitted]catggtgaaaccctgtctctaccaaaaatacaaaaaaattagccaggcattgtggcatgtgcctgtaatcccagctactcaggaggctgaggcaggagaattgcttgaaccagggaggcggaggctgcagtgagccgagatcgtgccactgcactccagcctgggcaacag[141 bp omitted]aaaccctgtctctactaaaaatgtaaaaattagctgggtgtggtggcgggcacctgtagtcccagttactcgggaggctgaggcaggaggatcgcttgaacccaggaggcagaggttgcagtgagccgagatcgtgccactgcactccagcctggcaatacagcaagactccatctcaaaaaaaaaaaaaaaaaaaaaaaaaaaagattggtaaggaagaagtaaaactatctctgtgctggtgctggtgacatgatctaaaaaactattcaaactacagtgagttcagcaaggttgcagtacacaaaatcaatacataaaaatcaattttatttctatataaaagcaacaaatacaaaaagaacaattccatttacaatagcatcaagggaagtgtgaaatgtgtacagtactctgagtgaacaaagcagtgttgaaaggaagatccaagggaatgtaaaggcatcccacgttcatggctgagaagacaacattaagacggcaacaccccccactgattgacaaattcaacaccatgtctatcagaaccccagttggcttctttgtagaaacccacgagccgatttcaaaagcatatggaagctcaaggtaccccaaacagcccaaacaatcttgaaacaatacttcctgatttcaaaattcaccacagagccacagcaatcaaaacagtgtggtactgccataaggacagcacaaagatcaacgaactagaactgagaatccagaaatacagtcacacattcatagtcaactggatttccacaaaggtatcaaaacagttccatgaaggaatgaacagtctttaacaaatggtactgggacagttgaatatccatgtgcaaaagaatgaagttggacccctatctcataccatatgcaaaaattacctcaaaatggatcaaaggccttaaatataagagccaaaaccacacaacttttcggagaaaatatatggataaatatttgtaaccttttgattgaatctaaaaatgtggtgggaaaaaagtttgtgaccttggatttggcaatggtttcttagataagacaccaaaatcacaagtgaccaaaaaaaaaaaaaaaaaccaaatggataaacaacttcaccaaaattaaaaacttttgtgcttcaaaggacgcccccaagaaagtgaaaggacaactgagagaataggagaaaatatctgaaaaataatctatctgataaggaacttcttctcagtataaagaacgtttaaaactcaataaggaagagagaatcccattgaaaaataggcaaaggatctgaacagacatttctccaaagaggacagacaaatggccaataagcacaggaaaagatactcaatgtaatatcaggcaaaagcaagcaaagtccacactacgataccacttcctaatcagagaataaaaactgtgctcaaaaagacagtaacaagtgttgacaagaacgtggacaaagtggaactctcctgtgccctgccggtgggaatgtcaaaatagtgcagccactttggaaaatagtccagcaattcctccaaaagttaaatagtatttaaccatgtgacccaggtcagggtcctaatatccatcagctgacaaaaacaaaacaaagcactagcaacggggcaaagaaggacgcactgacacactaccacatggacgcacctcgaaagactcatgctcctgaaacagccagacacaaaaggccacgtgtcgtatgactcatttaatctcaaatgtctagagcaggcaaattcgtagagacagaaaatggattcctggtggaaaggggctgggagttgatctggggtttggggagtgaccactaaggggtgtggggttccttttggggtgatgaaaatgttttaaaattgactgtgatggtggctgcacaactgggtgaatacactaacaaccactgaactggacacattaaaacggtgaactgcatggtaaatgaattatacctcgggaaagctgctgccaaaaagggtagattaaaatatttaatgaagtttaaaaacttgtgtagtaagaatttcaatacttcttcacgggtcctcaagaaaaaacctcacaggtggtataatcattcccctcacaaaaaaacaaggaaacaagctcaaagagatagagtcagttacccaagctcacacagcaggttcagtggtgcagttacaaagtggagctcaggccagcggcttgcaaacaccttccagcccatcacactactggggaacacaacggctagtacagttgacccttgaacaacgcaggggttacgggtgccaaccctccacacaggtgaaaacccatgcatgacttctgactccccgacacttgattaatagcctcctgctggtcgggagcactgccgataacatcaacagttgataaacacatattttatatattgtattatgtactgtattctcacaaaaaaagtaaactacagaaaaagttattaagaaaattgtaagaaagagaaagtgtatttactattcattaagtggaagtggatcatcctaaaggtcttcgtcctcatcatcttcacgttgagtaggctgaggaggaagaggaggggttggtcttcctgtctcggggtggcagagatggaaggaaatccatgtataagtgacccatgcagttcaaacccgtgaggttcaagggccaactgtacagcaacgtacagcaaagccacggaagggagctggggcagccactggccctggagtgactctggcaacaaggctgccaaggaccaaggagcacctcaagctctaagtggagactgacaggacccatccagctttagaaagtttagctccgtggtggcagagggcaaacagaagacagagggaaggaagagccagcagggcccccagggggaaggggccacgggactggaagcaagcagcacagagtgcatggcagctgcaggggcatctcacgcctcctgccctggggttggcctgggtctggcagagatggcctcacctctttccaggacacagcaggtggccaccagcccacaaccactctacacagccacacgcggtgtgaagccacagggaaagcatcctaagtgacctctgaaatcaccctcagccccctctaggaccctctgggtaggggtcgaggacaggttctctgggcaacggttcctgcctcagtcaggggctggctttctactcccgcaaccaggagcctgactaacaaggggatggcaggcgaccacatcaaatgaggccccagtctggacggcaagttgacaacagtcccgcaggcttgagatccacaccgagtaacagggagttaacatatggccccaggagaggtggtctgcagggtctgaggaggatctggcccttatatgacgtgccatttaacaggagagctaaggcagaggggggcaaagagggaagcggctgggaacggcagaaagggccgctaacagggaggccctgagcagcctgggatccccaagttcatttccaggcgactctgagttcctggaacttaccacggaatacagacttcatggatcttcttcctcccgctgcccctgcctggtgtccaggtgcaagtctactctcaaagcaggttcccagggactctacttcactcactcagaacactctgcatgtttccctctgagttcactcccaggaaagacaaagtcctctgttttgtcaaagtggaagcaggaaaaagagggggagcaggccaacggtattccaggcaacaaaaaaagcaaaggaagcgtaaacagcattctagaaacaaggtccagaggacaacaggccacagacccaggcgtccaccagggtcttcaggcagtagaagcggcagccagctactcaacataaagactgcaccagaggactgggtgcagagcacagaccagcccttcccccagggcagcccccacaggtatagagtgcaccaaaaacacaagaggccaccctgcaaagcttaacccaaaatgacagggtggcaggttccattcgccaagatggctgcacctacctctcccatgccccaagccctctccccagtgtgactgaaacaacctcctcctaagagccatgcttgaccctcctcccacccacaccaactcaagtgccaggcgcttgttggactacccagcaccccactcctccgtctgaccaatgttccctgggcgcccactctgggctcagcaaggcagtggcgtggtggttaacctgagaaacaagttccacctgcctccacccacatggagttgctagttttggacacagacaacaaacaagtggacatgtatggtaccgagaagagaaaacagggcgcacgggctctgcaactgcgggtcagggaaggcctggggggcctcagtcgaggtggaaccatcgttggcagcccccaaatgggtagagtgcaccagcaaacaggagcccagggccctagagtagggggcagatccgtggggaccacctcacagggctgtgggactcagcaaggaggagcattttatcccagggaccatgaaaagccatggagggttttaggtaggagcaaaagatggtgctcttaggtttttaaaagatcaatctagtatgcctgagaaaagtatgaagcattcccgtctgccactgtggtgcttatgattattctgggatactgatacagaataaagtagctagtactgatcacgtgctataaagttacaaattgccacttttacgggttaaaaacagtggaatatcgtcaacttcacaagattcaacttccatgtacaagccgttgtggcaggacctcatcagacctcctagctctgaagggtgaccattaaacttcccatttcagagatgaggaaaaggaagttctgagtcactgggcaacctgcccaagaccacacagaacaagtccggtggtcagacagcttgccatggctcctcacgctcagcacctcatacttgttggtcctaacccacccacgtctctctctgaccagactctgcatccctgtaggagaggccctgtctgctccattcactcccagatcctcaggccgaggacagagcgggacctccttagaaaatcaaatcaaattcactcaacagggcaccaccccaaagtgtaaaacagggttaacaggagcagccggaccacaagctgctgtgcacatttacggagctcagcctagagcagggcagaacagccacatggcagctctgggggaggctggcttgggagtctgacttgtgccatcccagacacagagctacctgtcaggccacgtgtgttgcccagattccaggagcacaactcattcgaccaccacgtcgctgcagggccactgggagacgcggcttctgcctccgaccctggaggacagccaccatctgcatggggactcagtctccctaagcgtctcaagaagaactaattctcgatgaaggaactggccggtggtctggcctagtatcgagacacctacaccgtctttggcataaacacagggcctgttactgcccctgaggtcgtcaccagggggagagaatggccagtcctgcctcccacaacgcccaagacataaacacgcaacgtggcaccacggccaggccgcagttccaatcccggcttcccacgaggcggctgtgcctggctgggtgggcaccttttcctttgggctctatcccagagataggatcagctcttgagtctgcccgcctgtcgtaacttctgcgcacagaagtcatgcactgagtcccactgactgagcacctcgcagccgccgcaccttcacctacattatctctttccatcttcaccagggccctccaaggtgaaagcaagtccacacaggctcatccaccactccaaaatcaaaaaaagcttcaaaagcgaaagtttcttccttcctggtttgacctgacacgaagctatctgttgtcttatcctagacagtcctaggtgggtttgatcaaacatcacagtccaaaatcccacagatcctcaaattggaaaaattctggattccaaaatatagctggtcccaaacatttcagataaagggtcccgggcttgtttcctggacgagggaggaggctccagaagtaacttcgtgcccgggagaggctggtccaactcttctgagatcagccccgacgctctctaggccccggcagacccacccaccctgcgcccagttcgcgccaggcgggtccgcgtcgggagttcaaatcccgcccggggtctgacccagccccgccggggggctcgcgggcggcggaggcgcggtgggtccaccgggatcccgatggggagcgcggggcgcctggcggccccagcactcggcaaagttggcaaaggcgcgggaggggaggcctgcgcgccgcggggcccgggccggggccgggaaccggagccggaccctggaacggagccgcgcgcccaccggacccccgacaccagccccgccccgcgtccctcccctcccccaccccggcccccgcccgccccgcgccgccgcgcatgcgcactgcagcccgcgatgtggcagccgggggagttggggggtgggggccggccgggggcggccgccgatggagccccgcgcccctccggccccggacgggccaggcgccccggccggcctcagagctccagagcggggctctccgtccctggggcccacgacgaggccgagccacggcggcggggggcgcggacgcgcgggggcggggggccggctcccccggcccgctcactcacctccgccatggccgtgtgtgcgcgggaggcggtggccgcgccgggatccccggatgaggggccgcgcactcattggctgtggagcctggagggcggggcagggggcggagcctggagggggcggagagcgggccgggcgcgtagtaggtgcgcgggcgcgggcgcgggcgcgcagccgagcgtggccggcggcttctggcgagcttgcggtgtctttccggccgtctctgctggaccctgatcttggccttggccttggcggaggagactgcattccataaaaatacgaattcctgataatcacacctgcgtggggaccacgtggtcctgtgtgacctcttcattccctcggctgctcgctgttaataccccgcgtggcagactaggaaactgaggcccagggcgacgggccacccagagtgtcagtgatagagccagaattggtgtccgggctgcgtggttctggaattttctgcactttcgcacccgtgatgagcaaactagcgcgcggaggaaccaatcggggagcttgcgaacgcgcaccagtcggagaggttttagaaacggtggccccgcgccggagagcccaaggcgggaggcagggaggtgggcttgaccccagggccatttggttctgcagtccgtcgtttcgcagattgaacatttctggaacacgtgcacgttctgatcctgagggtttgaaggagacagccctaacgcctgtcttcagggcgtttagagtggaggatgggaaggcaaggactcgccacaccttaaatttgagacggataagtgccgtgaatcttcggggcgcacgatgcagagagaggataggaagcaggggtggggcgtgaagaggcaggggccaggtgggagctgtggggcctggaccagagtgcagagagacttgagaaggtggacaccacaagactcgctgatggagggaagctggagagagtgaaggatggcctccagatgtctggcttgcgcaaatgagtggagggcggttcctactgagaccaggaagaagagaactggagaccaggaagaagggaattggggaccaggaggaagggaattggggaccaggaagaagagaatgagtctcattcctgtttcccagtgatcagccaatgaatagtgagaacttgacatgcatcagccttgattcctgatgcaaaatcattactcagtcctctgagaattcaccaaccaagagatagaagaaccactctggaggggtctaccctcactccttttttggtttacatcattgagattgagggttctggccctcgtgttgaagagtcctcactgatttgtgcaagagttggttccttcctttattattcatttgttattattcattcagtcattcagtgaactaaacacatatcttatgcagtcctcaactgggtgctgggtagccagaggtcctgtgaagcagggagaagcatgaacagataagagagtgaggtgctgtgctgtaacaggtggaggggcccgaagacaagggcttgagtccacctggcaaaacgagggaagactcttaggagagggcttggcaagaatcatcacatagatgtcaaatgaggacttgggtgaagagaagggtattgtggcttggaacggtgactcacacctctaatcctaacacttggggaggcagaggcaggaggatcacttgaggtcaggagtttgagaccagcctgggcaacagggtgaaaccctgtctctactaaaaatacaaaaattatccgggcgtggtggcgagtgcccataatcccagctattctgtggaggctaaggcaagagaatcacttgaacctgggaaggcagaggttgcagtgagctaagatcactgcactccagcctgggaaacagagtgagacactgtttcaaaaaaaaaaaaaaaaaactttaaacattagagggcatgacgataatgtgcctgtagtcccagctactctggaggccgaagtgggaggatctcttgagcccaggaggtcgaggctgcggtaagcagtgattgtgccactgcaccccagcctgggcaacagagtgagacctgtctcaaaaaaaaaaaaaaaaaagagtgaaggatattttaaggtctgaaagtctgtctccgtagactgttagtcgcagtggagaaatgaagccacttgttgggtgggtgataaaactcagcatccctggtaaagggcaggtgcacaccatgtgcacctggatgtggtgtccaaagcaggacacggcatcactgaatccagccagcaatgcacaacccatatctacatatgaggaaatttcagacaaacccaaataaggaatattctgttaaacaaaagagggactgtattcttcagaaatgttaatgccacaatggggcgtggtggcgggtgcctgtaatcccagctgctcaggaggctgaggcaggagaatcacttgaacccgagaggcggaggttgcagtgagctgagattgcgccactacactccagcctgggcgacaagagcaaaactccatctcaaaacaaaacaggccaggcgctgtggctcacacctgtaatcccagcactttgggaggctgaagcaggaagatcacgaggtcaggagttcaagaccagcctagctagcatggtgaaacctgatctctactaaaataatacaaaaaattagccgggcgtggtggtgcacacctgtagtcccaactactcgggaggctgaggcaagagaatcgcttgaaaccgggaggtggaggctgcagtgagccgagatggcaccattgcattccagcctgggcgacagagcaagactccgtctcaaaaaaaaaaaaaaaaccacagcgacaacaacaaaaaaaagttaatgccagaaaagataaacctgtgtaaatctttttttttttttttttttttttgagatggattctcgctctgttgcccaggctggagtgcagtggcacaatcttggctcactgcaagccccacctcccgggttcacgccattctcctggctcagcctctggagtagctgggactgcaggcatgtgccgcacctggctaatttttgtatttttagtagagatggggtttcaccat[134 bp omitted]ttccatgagcataaaatgaagtaaaactcagaaaataaagagcagcgaatcttgagcagggagcttaaggggagaggctggagagggtgcccctggccgtggcacagtggtttgagtggacacctcacgttggaggagatacgcctgcatgtgcctccactccaggctccctgtttcttctctgcctggttttcatggtcaccgggcagctcccaagtttgacagaggcatggtgtcccgggatgagggtccaggtcaccgcatcgctacacctcttggagcagatggagactgcgtggtggagctgggggtgatgaatccattgcagccccgaggcggggaggcaggggacgctgtagttcacccaagcagtgtcgttcttgcaaattttccctagaaaaaagaggcctcacaagatactggaggagctgtgagtagtgcatggggtggcctgtggtggatgctgggtgcatcatcaaaccctcccctacacaagcactaacttccccctctgctcagggtcaagtatccctctgaggggcggcccacatcagcgactggctggtacagatccataaagacccaggcacctgtgaccaactggggtcaaccgtgaggctgcagagctcctgtaggattggaggcggcttggtcatctcagctcgctcctccctccctccagccctgcttccttcactctctgacaggtgttgaccccaagggtaaccccgacaatattcctgcacataatctttgtctcgcagtctatttcctggagacctaacccgtgccacaa[146 bp omitted]cccatctctactaaaaatacaaagattagccgggcgtggtggcgggcgcctgtaatcccagctactcgggaggc[144 bp omitted]gcaccacggatgaggtagtttatatatacatattttaagaacacatttatttatcacagttctggaggctggaaagccttgatcaaggcgccggcagttttggtgtctggtgagagcctggtctctgctcccaaaatggtgccttggtacagcatcctccaaagggaggaacactgaaccctcacatggcagaggggatgggcagagagtgctccctttgacctcgagccctttttttttttttttttttgagacggagttttgcctttgtcacccaggctgtgcaatggcgtcatctcggctcactgcaacctccacctcccaggttcaagcaattctcctgcctaagcctcccaagtagctgggtttacagatatgcaccacgacaccaagctagtttttatatttttagtagagatggggtttcaccacgttacccagg[134 bp omitted]gcagagccctgatgtcttaatcacctgccaaaggtcccgccttttaatacaattgcactggggattaagtttcaacatgaattttggaaggacaccgtcattcaaaccatagcaagaagcaatacaaattgaaagtataacataatgagagagaagaggccataaaagagaatgaatagaaaaaaaaatagtccctggtgtggtggctcacacatgtaatcccagcactttgggagactgaggcgggaggattgcttgagcctaggagatcaagaccagcgtgggcaacataatgagaccccatctctaccgaaaaacaacaacaacaacaagaataacaaatatacacacacacacacacagacacatatatatacacacacacacatatatacagacacacatatatatacacacacacacatatatatacacacacaaatatatatacacacatatatacacacacacacatatatatacacacacacacacatatatacacacacacatatatatacacacacacacatatatatacacacacacacatatatacaaacacacatatatatacacacacacatatatatacacacacacatatatatacacacacacacatatatatacacacacatatatatacacacacacatatatatacacacacacatatatatacagacacacacatatatacacacacacatatatacacacacacacatatatatacacagacacacatatatatacacacacacacatatatatacagacacacacatatatacacacacacatatatatacacacacacatatatacacacacacatatatatacacacacacatatatatacacacacacatatgtatacaaacacacaaatatattaaacacatacacacaaatatatatacacacatatatacacacacacaaatatataaacacatacacacaaatatatatacacacacatatatacacacacatatatacacacacacatatgtatacaaacacacaaatatataaacacatacacacaaatatatatacacacatatatacacacacacaaatatataaacacatacacacaaatatatatacacacatatatacacacacatatatacacacaaatatatacacacatatatacacacacacaaatatataaacacatacacacaaatatatatacacacacatatatacacacacatatatacacacaaaatatacacacatatatacacacacatatatacatacacaaatatagacatacacacacaaatacatacacacacaaatatatatacacacaaatatatatacacacatatatacacatacacaaatatatatacacacacacatatatatacacacacacatatgtatacaaacacacaaatatataaacacatacacacaaatatatatacacacatatatacacacacacaaatatataaacacatacacacaaatatatatacacacacatatatacacacacatatatatacacacacacatatatatacacacacacatatgtatacaaacacacaaatatataaacacacacatatgtatacaaacacacaaatatataaacacatacacacaaatatatatacacacatatatacacacacacaaatatataaacacatacacacaaatatatatacacacacatatatacacacacatatatacacacacacatatgtatacaaacacacaaatatataaacacatacacacaaatatatatacacacatatatacacacacacaaatatataaacacatacacacaaatatatatacacacacatatatacacacacatatatatacacacacacatatatatacacacacacaaatatataaacacatacacacaaatatatacacacaaaaaatatatacatacacaaatatagacatacaaatacacacacatatatacacacaaatatatatacacacacatatatacacacacaaatatatatacatacacaaatatagacatacaaacacatacacaaatatatatacacacaaatatatatacacacatatacacacacacaaatatatatacacacaaatatatatacacacaaatatatatacacacacaaacgtgtatatacacacacatatatacacacatatataatactaaaaaagaaaaagaaatataaaacaaaagaaagcaaaacaaaatagaaagtgtaacaaatatgatgaaaaacaaagatgaagcatttatcctatcgagagacttaaataggctaaactcagaaaggatcagaggacaaatctcaaccttatgagcgaacgtaggagtaaacctaagacacagtgagtcacacggcgttcccgtccacgaggcacgggtgcctcaccaccagcatgctggtgggtgatctagctcccaaatccaactttagaatctactttctcaaactccttttgcaggtcagattctccaggaagtgaatgctgaggtagagatttgtatgcaggaaattctgacgcgagggcccacgggatcggcacctgtggggaagtgaaggcagcagggcagagagagaaggatctgcagcacagttaccgcggaggcttcggctgtggagctgggctggcccctcagagctgtatcctacgggggcacgggacaaaggctttgtacccatgcattgaccagtcattggggagggagagaaggtgaccacggggtccagttgtcttcaggcaaggacatttcccagaggtattgtcttccagaggctggaggacgagtgctgagttctgggggggatcttctggctggtgtgccacagctccactacatcttgttctgagaatttaaatggcttgtatttttcttctagtgatcacctttataattataatttcatataatctacttaattccattccttcagaccaacactgtctaacacgaatgtgatagaatttaacattttctagtaaccacattaaaaaggtaaaaagacacaagtaaaattaattgtaatatgttatttaatacaaatatctgtaaagtattatctttcccatgtgtaatcaatataaaattattgagatatttacactctgttttccatactgctttcaatctctggtgtgtgtttcacacttataggacatcacaattcaaattagccacattttacttgcccgcgaaccacatgtggctacaagactgcacagcacagctttagatgctgacactgtttctatctattgactctagtgtttaaaaaaaatgacattaggatacttctgctttgccctattccccctctcctacataacagaatcctagttaattacattgattttcttcctgtttaacattatgctcttaaatatacttacatttctattattggaataatccatttaaaataatttttttgatggggaatgtgtataactgtaccacttcctattatctctgctcccctcactttttgttaaccataccctttctagtttcaagatttataacatctacatttgtagccactcttcttagatttgatttaatgccagtcctcaaggtgaatggactcagctctcagcatcagttctcttgctgtggcttctccattttctctcagttggctgaaagtcattcttaaatagtttcttcaggaagttccttcaattcttgcatgctctaagacatttgtctgatgtctttattttatttatttattttttgagacggagtctcactctgtcacccaggctggagtgcagtggcgcaatcttggctcactgcaacctccgcttcctgggttcaagcaattctcctgcctcagcctcccgagtagctgggattacaggcgcctgccaccacgcccagctaatttttgtatttttagtagaaac[141 bp omitted]tgggtataaaattatttctccagaccatcttacttcaacattaagtcctccagaactttgtagacatttttctattgacttctagcaatgaatgttgctgaaataaagtctggagagaggcttttcccttttaagtctcttggtcttattatcttgatgcactcaggtataagccatttagtatcatttttcttgggacatggtgagttattccaatatatagatgaaaatcttcttgtaattctgggaagttttcttaaattataaatttaaatatttgctgcgttccattattttgtatctcttcttcgtgaatatcatttttatatatgtagtatggcctttttctagcttccaaatctattatcttctctctgacccttcatgatgatctgctattttcatgcattgtgttagctttgtcaatcctgttttccatgtccttttactattatgtcttctgcaatgtcagttctccttaaggcaatttagacttcattttaactaatttagactttcattttttcttccatttctttcctaaattctgcaacctcatgttaatctccttctgtttcctttctgtatcttctatgaactgtattcctgctttgtgataatttatttaaatatttggtgatttttttttttttttgagagagggtttcactgtcacccaggctggagtgcaatggtgcaatcttggctcactgcaacctctacctctcgggttcaagcgattctcctgcctcagcctcccaagtagctgggattacaggcacccgccaactcgccaggctaatttctgtatttttagtagagatggggtttcaccatgttggccaggctggtcttgaattcctaacttcaagtgatctgcccacctcggcctcccaaattgctgggattacaggcatgagccactgtgcctggcctgtatttggtgatttttaaacaatacttattttctctgtgacatctttatttcaatcctatccttttctttttttttttttctttttttgagagatggagtttcactcttgttgcccaggttggagtgcaatgatgtgatctcggctcaccacagcctctgcctcccaggttcaagcaattctcctgccttagcctcccaagtagctgggattacaggcatgcgccaccacgcctggctatgttttgtatttttgtagagacaggggtttctccatgttggtcaggctgatctcgaactcccaacctcaggtgatctgcccgcctcggccttccaaagtgctcagattacaagcatgagccaccgtgcctggccttaatcccatcctttactttctcatctttgaataagggtgatctccctaaaccagcctttattaggaggttatatgatgatcaagccaggactctgctcctgttagtaggaatccttctgtgacacagtctgtgtgacagtgagttattttagcctttgttgttctctgactcagcaaggctggcacagcagagttgttcagaaggcaaccccatgccagcacccagtttacgggaagattccttcctcctgcaaatatgatttcacatggcagttactcattcagcctgcattcccttcttcctgaagtttcacgccaaaccgaatctatagaaactcctactgccagcctattcctaatattattattattattttgagacggagtttcactcttattgggcaataagatctcggctcaccacaacctctgcctcccaggttcaagcaattctcctgcctcaccctcccgagtagctaggatcacaggcatgcaccaccacgcccggctaattttgtatttttagtagagatggggtttctccatgttggtcaggctggtctcgaactccgacgtcaggtgatccgcccgcctcggcttcccaaagtgctgggattacacgcgtgagacactgcacccggccacctgctcctaatattctgagaaagaattattagtgttgcccccagacgatggatgtattttggaaaactgccctaccagctttgtctgagatctgagcccatagacaccctttcccagcatttctgacacccttagtaaccttccctttatcattaatttgttttcttatcagttcaaggtcacagatgtcatcacgtttcttcaaagataggtgtgggcatctccatttctcattcctgtaacttcttttggatcgtgatgcccctgcaggactacatcgctgtttacttgctcccctattggtggacattccggctgcctcatttttcataccagctgtcactgtctctgtatatctctatctatctatctgtccattgagagagagcacacatttaattctttggttaatttatttgctttttttcctaaacaagagcaaagcaatgttttccagtacaaattttgttgccaaaagtcaagaagaggccaaaagtatagaagcatcgtttgaagctgcagtgcccatagtgaaaaaacaggagcaagttggtctattgaaaaaaagccatgaaattcaacacaaagttctttctttctttctttttttgaaacggagtctggctctgtcacccaggctggagtgcaatggctcaatctcggctcactgcaacctctgcctcctgggctcaagcgattctcctgcctcagcctcccgagtaggtgggattacaggcacccgcca[137 bp omitted]cgcctagccctttaatttaatttgatttatttttaatttttatttttatttatttatttttgagacagaatctcactccatcacccaggttggagtgcaggggtgctatctcggctcactgcaacctctgcctcccgggctcaagcgattctcgtgcctcagcctcccgagtagttgggggttataggcgcccgccaccacgctcagctaatttgttttgtatttttagtagagatggggtttcaccatgttgcccaggctgttcttgaaatcctaacctcaagtaatctgcccacctcagcctcccaaagtcctgggattacaggtatgggccaccacgcccagcccagcaatgatgagttttaaagaatatacaggttattttgtttttattttattttttattatttttttgagacggagtctcgctctgtcgccaggctggagtgcagtggcgcaatctctgctcgccgcaagctccgcctcccgggttcaagtgattctcctgcctcagcctcccgagtagctgggactacaggcatctgccaccatgcctggtgaattttttgtatttttagcagagacaggttttcaccttgttggccaggctggtcttgaactcctgacctcatgatccacccacctcggcctcccaacgtgctgggattacagtcgtgagtcaccgcaccgtgctggttttggtgggcatcacctgtccttggctctaatagaggatgttacagaaatcgtgtaggcgcaggtttaggtgcaggcacaggtgtaggcatagcacagtgtaggtgcaggcacaggtgtaggtgtaggcacaggagtaggtgtaggcacaggtgtaggcatagcacagtgtaggtgcaggcacaggtgtaggtgtagcacaggtgtaggtgtagcacaatgtagttgtagcacaggtgtaggggtagcacagtgtaggtgcaggcacaggtttaggtgtagcacagttgtaggtgtaggcagagatgtaggtatagcacaggtttagatgtaggcaaaggtgtaggtgcattgtaggattaggtgcaggtgtcagcacggggtaagtataggcagaggtgtaggtgcaggcacagatgtagttgcaggtacagatgtaggtgtatattttctcttggaaatagcaaagcaccggccagacatggtggctcacgcctgtaatcctagcactttgagaggccg[134 bp omitted]gaagcaggagaatcactggaacctggaagtcggaggctgcagtgagctgagaccacaccactgcactctagcctgggtaacaaagtgagaccctgtctcaaaaaaaaaaaaaaatcgaagcaccttgaaactctacagtttcaatcccagaatccattacccactctcatgtttaaaagaaagctcctcttcccatgttccctatcttggtaaatggtgatgccaccccatgagaaacagggtactctctgcttctttcagaaacgccacagtctatttatttatttatttattttgagacaaagtctcggtctgtcacccaggctggagtgcagtggcgtgatcttggctcactgcaacctccgcctcccgggttcaagtgattatcctgcctcagcctcccaagtagctgggactacaggtgtccaccaccacgcttggctaatttttatatttttagtagagatggggtttcgccatgttggccaggctggtctggtactcctgatctccggtgatccccccaccttggcctcccaaaatgctgagattacaggcgtgagccaccgcggccggccctgatcattttatttcacccagttctgacactgtacttcctgaagatctctcctatccagccatgtcacctacttccaggctacagagaaattgagagtgccaaggaagccgccactgtctgtggttggcagaatagcacctcaggaacgttcccagcccagtccccagtcctgtgaatgggtcgccttaaatgatcaaggacgttcccaggcctgtgaatgggtcaccttaaataacaagagatttgcagatgggattaaggatgctgagatgagagattatcctgatgacccaggtggcccaaggtcattacagtgtcctcaagagaggaggcaggagggtgagagtcagagagaagaggctgtgctggtggatttgaagatgaaagacctcagcccgcaaccccacaccagggaggcaagcgcctccagatgccagaaaaggcgggaaagggactctcccctggggcctctggaagaggcagccctgctgatacttggactttagcccaagtgagatctactttggactccatcctccggaaggataagagaataaatgtgctttttgttgttgttgtttttgagacagagtcttacagtctctctctgtcacccaggctagagtgcagtggcgtgatctcggctcactgcagcctcaacctcccgggttcaggagcttctcctgtctcagcctcctgagtagctgggattacgtgcatgcgccaccacacccaattaatttttgcattttcagtagagatggggttttgc[134 bp omitted]gtttgttacagcagtggccagatgctaacatgggaactgtctttgtccgtttgccccgctgtaacaaagtaccatagaccggtgggttagaaacaacagaaggttatttcccacagtcctggaggctgcaagtctgagatcagggtgccagcatgatcaggtgctggtgacgggggccctcctggttgcacacaccacctgcttctcagtgtcctcacatggcaggcaggggccactggtgtctcttgatcctcttttataaggacaccaatcccatgcatgacagctctgctccataacctcattgcctccccaaagcctcacttcctaataccatcaccttgagggtgggaattacaacatatgaatctgggggagacacaggcgttcaggccatagcagggactgggggtcttttcctaacctatttgagcctcaatctccacgtctgtggaatggggacaatgataatccctccatcattaggtcactctaaagatccataagttgtgcaacaggtgtcagctgctttgactgtggctgtcgttccgactccgacggtcccgtggcccctcagcaggagcgtcggctgctttgactgtggctgtcgttccgactccgacggtcccgtgggctctcagcaggagcgtcggctggtttgaccgtggctgtcgttctgactctgatggtcccgtggcccctcagcaggagcgtcggctgctttgactgtggctgtcgttcctactccgacggtcccgtggcccctcagcaggagcgtcggctgctttgaccgtggctgtcgttccgactccgacggtcccgtgggctctcagcaggagcgtcggctggtttgaccgtggctgtcgttctgactctgatggtcccgtggcccctcagcaggagcgtcggctggtttgactgtggctgtcgttccgactctgacggtcccgtgggccctcaggaggagcatcagctggtttgactgtggctgtcgttccgactccgacggtcccgtgggccctcaggaggagcatcagctggtttgactgtggctgtcgttccgactccgacggtcccgtgggccctcaggaggagcatcagctggtttgactgtggctgtcgttccgactctgacagtcccgtgggccctcaggaggagcgtcggctggtttgactgtggctgtcgttcctactccgacggtcccgtggcccctcagcaagagcatcggctggtttgactgtggctgtcgttccgactctgacggtcccgtgggctctcaggaggagcgtcggctggtttgactgtggctgtcgttcctactccgacggtcccgtggcccctcagcaggagcatcggctggtttgactgtggctgtcgttccgactccgacggtcccgtgggctctcaggaggagcgtcggctggtttgactgtggctgtcgttccgactctgacagtcccgtgggccctcaggaggagcatcagctggtttgactgtggctgtcgttccgactccgacggtcccgtggcccctcagcaggagcgtcggctggtttgactgtggctgtcgttccgactccgacggtcccgtggcccctcagcaggagcgtcagctggtttgactgtggctgtcgttccgactccgacggtcccgtggcccctcagcaggagcgtcggctggtttgactgtggctgtcgttccgactccgacggtcccgtggcccctcagcaggagcgtcggctggtttgactgtggctgtcgttccgactccgacggtcccgtggcccctcagcaggagcgtcggctggtttgactgtggctgtcgttccgactccgacggtcccgtggcccctcagcaggagcgtcggctggtttgactgtggctgtcgttcctactccgacggtcccgtgggccctcaggaggagcgtcggctggtttgactgtggctgtcgttccgactccgacggtcccgtggcccctcagcaggagcgtcggctggtttgactgtggctgtcgttccgactccgacggtcccgtggcccctcagcaggagcgtcggctggtttgactgtggctgtcgttccgactccgacggtcccgtggcccctcagcaggagcgtcggctggtttgactgtggctgtcgttccgactccgacggtcccgtgggccctcaggaggagcgtcagctgctttgactgtggctgtcgttccgactccgacggtcccgtgggccctcagcaggagcgtcggctgctttgactgtggctgtcgttccgactccgacggtcccgtggcccctcagcaggagcgtcggctggtttgactgtggctgtcgttccgactccgacggtcccgtggcccctcagcaggagcgtcggctggtttgactgtggctgtcgttccgactccgacggtcccgtgggccctcaggaatggacgaataagtctggactgaagagattcagaaggcgctcgagatggtcaatgaaagtgactcggaaaataaacagctggacaagtcgcaggttggatgcaaaaataaatattattgtcctcctcatccttcttttggccttctagcccgccctcccttctccaggccaaaaagctcagaataatcacatacacagggttagggtgcctgagggtgtttactgggagcggaggtcttagaggccaggcctgggttgatcacacttttctggtgatgcttttgggggtggcaagctcatagaggcgaggggacgcctgtcgtatccctcgttgaggcccttgcgcactttgggcttggccagggagatgatccgggggctggccaccaccttcttggtgacatccagcacctcccagcgaggatctcggtcaggaacgcacttgtccgactgagctttgggccctagtgggggcagaagagaaggacagcactgaagctcaaacctcaaagctccacattcaggctgggcatgggagctcacacctggaatcccagcactgtggaaggctgaggcaggtggatcacctgaggtcaggagttagagatcagcctggccaacatgatgaaacctcgtctctactaaaaatacaagaattagctgagcgtggtggtgcgtctctagtcccagctactcgggaggttgaggcatgaggatggcttgaacttgggaggcagaagttgcagtgagcgcagatcgcgtcactgcactccagcctgggcaacagagcaagactccatcttaaaaaaaaaaaaaaaaaaaaaaaaaagctcccccattcaaacggcctgctcatcagcagagaaacggaggatgaaaatgtagtccactcagagtggaatatgactcagccaagaaaaggaacgaggctctagcaccagctacagcatggctgagccttgaggacagcatgtgctgcgagagaccagagacacgaaaggacacacagtgtgtgattccatttatacaaatgtccaggacaggccaatccagagtccggaagtgaacgtgtaggtgccaggggctgggagacgggaatggggagtgacagctgatgggggcggggctgccttctgaaggcataaaaaggttctgaaattgactgtggtggtggttgcataaccctgtgactgtactaaaagccactgaaa[131 bp omitted]gcctcagcctcctgagtagctgggactacagacgtgcaccaccacagccagctaatctttctattttcagcagagacggggtttcaccatgttggccaggctggtcttgaactcctgacctcaggcgatccgcccgcctcagcctcccaaagggctggcattacaggcgtgagccactgtgcctggcctattttttattttatttcattttatcattttattttactttattattttatttcattttgagacagagtcttgctctgttgcccaggctggagtgcagtagcatgaccttgactcgctgtaacctccgctccccaggatcaagtgattctcctgcctcagcctcccgagtagctggggctacaggcgcccgccaccacgcccgactaattttttgtatttttagtagagacagggtttcaccatgttggccaggctggtctcgaactcctgacttcaggcaacctgcccgcctcggcctcccaaagtactgggattacaggtgtgggccaccgtgcccggccccattttattttattttgaggcagggtcttgctgtgtctcccaggctggagcacgatctttagctcactgcagcctccacctgacttgaactgctgggttccagccatcctcccacctcagcctcgcaagtagctggggctacagtcatatgcactgccacatcgagctacgaaacctacacttaaaacagggtgaattacaaataaaaaatatttcggttgggcgcggtggctcatgcctgtaatcccagcactctgggaggccgaggcgggcggatcacaaggtcaggagatcgagaccatcctggctcacacggtgaaatcccatctctactaaaaatacaaa[138 bp omitted]agagcgaagctctgtctcaaaaaaaaaaaaaaaaaaaagaaagaaaaaaaaagaaaaaatattttaaacggccactggcagccaggctcaatggcacatgcctgtcattccagcacttttggaggcagaggcaggaggatcacctgagccctagagttttgaggccagactgagcaacacagcgagaccccatctctaaaaaaaaaaaaatggccacaggtacctgaaagggggactcagggggccacagccaagagagctcaagtctcctcactctgctgccaacacaggtgaccctggttcacccccctctccacctgctcatgtcatggtggtaagtgggtcggggcaggaggcatctcctccccctggctggggtcatgtcttgctccctggtggctgtccctcaggcactcgtggccccctcctcctggtacccccttctcaccatctctcccccaccccttcctttatagcagggagctgcagcagactgcttggagactaggaagaaaggtggccaccgagtctggcatagcagccggggctgtcctctaccttgtctctgaaggcttcagggcctttgatttctgggaaagctcccaccttctttccagatccctctttgcgtggaacttctgcgcaaatgaataagggctacccacttcttggcagaccagccctggctctgtgaagaggctcctggggaaaagagtgtggagtctcttccactaggcaggcagaaccccacgtggcacgtggctgggcaaggccatctgaatggaaactgcagatacagcactgccttagaccatcctgcacgcacccgcgctcaccacacacacacgtcgtgaatataaacatccatatactggtacaggtgtgagtgcttctctggcccctgctctgcatgctaattgtctcttctgcaccttccgggtggatgcgagctctgcccggcagatgcccttgtgcagggtaagggggccaagcagtggggccctggtgaccctaagggggctggaagaaccgtgcccagagcctagccttctttgaactcctctgtgagaatttagtaggcatctgggctttgaaactctgttgagtttccagcactcccgagcagcagcaactgagcccacatagcaagcgtgagcacgcacagagaaacagcacagccacacactcgctcttacccccaccacacagcaagtgtgagcacacacacacagccacacactcgctcttacccccaccacacagcaagtgtgagcacatacagccacactcttacccccacatagcaagtgcgagcacacacagccacacactcgctcttacccccaccacacagcaagtgtgagcacacacagccacacactcactcttacccccaccacacagcaagtgtgagcacatacagccacactcttacccccacacagcaagtgtgagcacaaacagccacactctcgctctaaccccacataggtcagtgcacttcatttgctg[132 bp omitted]aaaacctgtctctactaaaaatacaaaaattagccaggagtgatggcaggctcccgtagtcccagctactcgggaag[137 bp omitted]aagcctcaaccctccgtcattctctcacacacgcatgcacacgcacaaacacatgcatgtgcacacacggatatatatttatatgtacatttgaaacatggatggatgtatccatgcatgtgtgtaccagtgtatcgatgttcatactcaacgtgtgtgtgtttgtggtgagcgtgagtgcgtgcgtgtaccagtgtatggatgtttatactcgccgtgtgtgtgtggcgagcacaagtgtgtgcaggacggtgtaaggcagtgctgcatcagccctcatctgtttccattcatttcactcatcatttcacaaatatcaagggaatggatgaaagaatgaataaacaaagaaaaggccccataagcgaagttaaaagacaagacagagacttgggagaagttattgtgcaatgtgttcaacaagggattaataaccgtcttacataaagagctgctcccaatctacaactccaaaacaccaggcagcaggaaactgggaaaacgatatagaagagtaaacctaaatggccaagcaacttctctggcaattcgcacacattacccttgtcgttgaggaaaatggttattcaacttgttttaaaagacaggaatggagtcaggccaacacccattttaaagctgcatttgttccttagcgtggttctctggttcctgctctgcaccctgattttctcttctacacctttttttcctgctagaaaaccctctcagacaacaccctctgcttccggaccacacgtccctgtgatttctgcttctctttcatgggggagagcttccctctgcccgctctaggcagaggtataaggtgtcccttgggatctgaacaggacatcaggaaatgcctagcctgaggcacctacttactggccaagtgaaggaggcggttatggtctgacacatgtggcttgggttttggcacggggtcccactcttccaagagggtggctggggccttcggctttgacaactggaggatccgcgagctggggactgccatttgggctgccctggatacctgggacacctggaaagagaaatagagagaagggttacgtgaaacagtccatgatgcctcgtgggccctggagctgaaggaccccaggagcaacactgaaagacacaagacagactgggaagaagttggtttgtaatgtattcatgaaaggattagtaactatcacgcataaagagctcctccaaaccaataaccaaaaaaaccccaaaagggctgagcaaagggtacaggagacaaaccctaaatggtcaataaccctgtcttttgaccaatgtaatatcaacaattgttggcaaatgtaaattaaaacaacaaaatatcactccacgctcacaaatttggcaacaatgaaaaagtctgacatgatcaagccctggtgagaggctctcatgcatgactggaaggagagtaaattagtacaggcagctcagggagcaattcgtccactaggttcagctgaacacgcgcaggcttggtgactgccacatacggggactcctgcgcttgacccgaggaagtgggtgcagggatgttccctgcagcttagttaccacacacacaccccggaaggagccgggcgcccggccgctgggggctgcacaagctgactgcagcgcattctcaagagagggcaacccagcaattagaccattttttttctccataaattggcacaaattgctctagaaaacagtaatgagggaaagcaaaacagaagtcatttatggtcacgaacaccacgaaacacgacctaggggacaggatatgaaaacgatggcagtggggcagtgctggccgaggcgggagaccttgcggacgtttcacccagaaacttggcacccttgctccccaaatcaattctcagcagtggccagcacagtggcagccctttggggggtcgaggtggcaggatcatgtgagctcgagaccagcctgggcaacatagcaagaccccatctacacacacattcttggcattttccagaaaacccatagtgcactgaaagtgtgttctttgatgctttgcaccagcctacgcagagactgagtactgcgcggcgctcagacacccttaaactggagctggcttccctcctctcgcctcatacgcattctgttccccttcaccaggcttgctcccgtacacgtgtgtaggagtccgcctgcaaaataactaaggagtaggcaaaggaccgcttcacacgtctcccacttatgctttgctggaagaggaactggccattcctgatgcctctggggagggagggagggagggaaggagggcagctgctgaaatgttttcttccttaaaagggaagtggaggtggccgacccacgcctaactggatgctcctgtccatccattcttggagcgttacctgacagtctgtgattgttggctggtcctaactctagagcctgcgtggaggcagaggatgaaaccatccccaaaggtcactgtgaaatttcagtccctttcttcttgaaattgctcccccataaaaatcacagacacatctctcagcaaagatattgtggtgtttacaatggaagctcccactcagtgatccgtcttctccctccctggctccctccagcctcctctcttcccaccagccctgcggcttccatgcacacagctcaggccgggctgctgaggtagagagactccatttcagtcctgctttcaaggagctccagtcctggaggggcaggccctgattcatccaaaccaactgcagaaagccgttgctcagacaagtgggaaagggaacatggaccgtgcatgttggtatcacggaaccactgttcactttttagtgtgatcagtgttactgggttcgtgttttaaaatgtccttgtctgttagaaattcctactgaagttttatgggagagatgctgtcactttaaacacgtttaactttaaaccccactttaaacaagtggggtctgagaaaccaccataggagaagacgcgaccacacacagtgaggggaatagaagttaatgccacgcgagaaacggccaaaacgtttaggaataatcaggtgaacaaaccaacaagcaagaaagcaggcactaccaccgagtgctgaccacaatggggagagcctgagctcaatccccgcccggagaatgcaagacggcggccaggatgaggcaggcctgagcttccactccccgcccggagaatgcaagatggaggccacgacggggcacaccagagctcactcccctcccagagaatgcaagatggcaaccaggaaggggatcgcctcagttcattccctgcttggagaatgcaagacggtggccaagatggggaagagcctgagctccctctccccacccggagaatgcaagatggtggccaggatgggtttcaggcacatccgtgtgaagaagcctaaacaggctttgtgtgagcaataaaagcttttaatcgcctggtgcaggcgggctgagtccgaaaagagagtcagcaaagggtggtggattatcaattgttcttataggttttgggataggtggtgaagttaagagcaatgttttgcgggcaggggtggatctcgcaaagaaccttcttaagggtgggggacattacaaagtaccttgatcacttagggtggggcaaaaacaaatcacaatagtggaatatcatcagttaaggctatttttacttcttttgtggatcttcagttacttcaggccatctggatgtatacgtgcaagtcacaggggatgcgacggcttggcttgggctcagaggcctgacaacagggacagcctgagctcccacttcccacccaaagaatgcaagatggccaggatacggcgcacctgggctcccactcccggcccagacaatgcaagatggtggccaggatggggagcgcctgagcgcaatccccacacagagaatgcaagacggcggccaggatggggagagcctgagctcaatcccggcccagagaatgcaagacggcgccgtcactttggacaaccattggtcagttttttaaaagttacatatacccagtaactgagaaattccaattctgggtattaccctggagatatggaaacttacgcctccacaaaaagctgtatacagatattcacagttttgttttttttttttgaggcggagtctcgctctgtcgcccaggctggagggcagtggcgcgatctcggctcactgcaagctccgcctcccgggttcaagcgattctcctgcctcagcctccggagtagttgggactacaggcgcccgccaccacccccggctaatttttttttttttttgtatttttagtagagacagggtttcaccatgttagccaggatggtctcgatctgctgacctcgtgatccacccgcctcagccttccaaagtgctgggatgacaggcgtgagccaccgcgcccggcgtattcacatcagttttatcgtaacagtcctaaactggaagccacccaaatacccttcagtgggtgcctggatcggcaaattctggaattgaaccggcgacgacaaggaataaactaccgacgcacgcgagagtctcagatgcagggcggggggcggcagaagccgggtcaagcccgcaggctgcggggttcagactttcggaaaagcaaaaggtacagggcgtagagcgaggtcagtggttgccggtggccaggagtccggcctgagctggggcgagagatgagcgctttctgaacacctgagataagactgttctaattcctgagtgtgagctggaagctttgggatccacccggactgaagcgcagggaaggatgacccctgggcggctctgaagacagtgagagatcaaaagaaagctgctcccagacaaaggcagccgccctgtgcagcttctcctcctcccctgactcccaaacgcaaagcctctttcactctctgccgggtcccagcccgcctggcgggggtgagtcgcggggggcacggggcacccacctcagacatgggcatgctccagaagttatcacgaatcttcggggcggccagttccttcaggcgactcgacgctctgtattccagggaggaccgaggaatgggccagacaggagtcgtcctgggggaggtccccattttagaccagcagctcggccgggggtgggggtgtgtgtgtgtgtgtgtgtgtgtgtgtgtgtgtgtatgtgtctgtctgtctttcccagctcctccatatgtgtctgtctgtctttcccagctcctcctctgtttctggggttaagagagcctgggagagtggtgagttttgaaagcgtctccaaacagggattcgtaaagaatttctaagagttctcaagtacagagctaccatctcccagggttgtctctgctcaatgtgcaacgtccaccctcaggtccaggccttctccattcccttctgggacggcagctcctcccaggccttctctacacacccccatcatcaagagcctggcgtgagcacttggacccaagggatgaaagtgtctgtcctgaggttgcaaagctggggaaagcgaaggacagctgagctcccggggctgtgccttctgaaatcaggtctcagctatgcctctgctcggaaataaagccgcatttcattgattctaaggcaaggtctccacattgaacaggtctgaggttaggatgcagcttacgagtgctgccagccagatggcggaagtgtcctggctacatctggctgcatctgtgtgtgctgttcacgtgatctgcactgctgcttctacaggagttaagtttaattacagtttaaattgtcttcaggtcacagtatgatttggcgttaaaaagtgcacagaggcgtgaggacagtgtgtgcgacacccacatcaacgtctgtgtcagaagtggttcaaaacagttggacacacttccgctgtctacttcagctgtgctttccttcatacgctgcataaaagatgggtaattatatgttgtgtctaaataactaaagatcacttttaacaagcacaggggctgtaagtggtaagaaagaattttgtacataaaatactaatgtgtcttagaatttccaccttttttgagtaaacaaaatacagtcacaatggtgataacatctgagcacgcactgtgtcaggcgctgtgcaaatccccgttcacgggtgccctccaccaccattccacagctggcaatgcagttgcacggggccaagcagcctgctggggatgtggactgggaagcagcctgctggggatgtgggctgggaagcaggccagccccgtctgaacaccagctgtctagggctaggacctggaccctttcccacacagcatcctgtcaggcgagaataaggcatttctgccaaactctgccttctgagtagccacccagccctccttcccccacctgttgttgttgtaatattccaggtagaatctcttgggccgagacagttcctccacgcggcgggacaccgctatgcaaaatgggaaacggagtcagtgaaccccagtgtcaacaccctgcagttcccaggggcttctgcatgcggaattcagcttttcatgagcttgggcaggaggctgaattggaagaactgtgggcagagacaactgggggccagacaccctgcagagagaagatttgctgtccctgatttagggacaatgggctcagaggcttgaaggtcctttctcggacaccggatgggagtggcagggctggaacagcagcccagcaccgtggctcctcaacggggctcaatacagatccagggacccacaggctgggaaaatgggttttgttctgaagttagtacaagcctggggtttccaggggcctagtgatgactgtaggtctaaagtcaagaacagcacaggagagaactggactgttattctcctctatggggaactctcgaagtgtctcatttgaaggtatctatgatacctcaataccaaattcctctcaagaaaagcatggaaatcattgtggaagggaaagcaaagggtctttttgtaaattcttgccccgatttggccctatcctagagagtgttccccatgcccctcacccccaggaccagtctcagctctagctcctcaggggacagactccagtggggaggacagaggctccgaggagatggggcaagggaggccagaagtatctagatggggcggggcaggttccctggaggccggcagccgggggcaggggtctcagcaggcacgggctccacctaccgggcactgtgatggtgagggtggtgtcctcaaggaaccgctcggtccagtacacagagggcctggaataagcggacggctcagggcaagggaggcagagagccctggccctgcccggaaacaagcctgggtctctgccaggagggtggccgaggtggggtgtggagttgctgggagagggggtaggccagagaaggacagtgggggggccggcgggacgcgtggattattgtgagcaaggctgatgtccagagaaggaggtagctgggggagaagcatagctaagaagagggcccagggccacctcctgggagcagacccaggtcacaagggtggagagccccacatctgaggagccctccctgatcctcctccctggagagaggagggtggctggagtgaaggggtcccctggaacctgacacgtgtcccccagcataggcacacggcggagacagccctggacttaccagcagagacagaagtgcaagctcatcttacatggggagatccaggcataccccttaccacagcgtcccttcctgcgaggagacagggtccgagccccactgcctcttgccctgggtctcccgtttgctcccaaactcctcactctcctttggccaccgcccagagggccaccgttccctagccactcccagtgtctggccacctccttaactggccaaccccacctaccctaagtttgctggatgtggtggcagctgggggaggggagccgagcagtggggacaggaggagcccgggaagggtgcagagaaagccgcccacgctgcccctacgaggccgtggtctggcgtgtcctcacctgtctttcaggacttgccagtttatcttgggctctgccagctccatgagcctcctccgcctcctcctcttccttgctttggtcatggtggtgctggggagcttctggctgatggacagccggctttgggagaattccacgttgaagttggagctgctttcccgccccgatgcgtttgggagcccagagaagcgtgggtcttgctcaagcgccttttgtctgcactcaccctgcccacccgcctctcctttccctcgaggggtctctgagggaggactttggcaccacgaaggcctggaccaaccgcagctccactgctcgctggatggaagacccgtccaggtcacctgtctcccctggtcctcagcttcctcctctgtgaattggaggtgagaccagctcccacctggcggggctgttttggtgagtactaaggtagtgtttactcatctcacagacatctgtcaagtgcttactgtatgccaggccccagaggggcaaccaccctctaaagagagcggctcctgcctcccagaaagctcacagactgtgggagggaaacaggcagcaggtgaagatgccaaatgccaggatatctgccctgtccttgcttgatgcagctgctggctcccacgttctccccagaatcccctcacactcctgctgttttctctgcaggttggcagagccccatgagggcagggcagccactttgttcttgggcggcaaacctccctgggcggcacggaaaccacggtgagaagggggcaggtcgggcacgtgcagggaccacgctgcagggaggacgggagccgagtcccagaggtatgtagagtgcgcgccttgctggggacactccagcaactgcccaaaatcagcgcccccagtgctgattggccgaagcgtcagttcacccagaacgtgttcctcccgaccatttaaaaccttttagccacgtgtggtgcttagaatggtttcaacttttgagttgggaggctttttttttcccatttcttattctctctgtctgacttgaggccatcactcgctaaactctgaactctgggcacctgaactcagtctgcctgactccaaactcagcgctgtttactcctcctcctgccaccagataggggagcgtctgctggtgtctgcctcagggcccagtgaggggtgctggccgccaaccgaccaagcccacacctaggctgactcggcagggccgggcccctcgggagcagcgagccaggccggtggccggttacgaccctttcgcccgcccagggggctgctgccctccccccactgccaggggctgagccctaccccaccgcacccaggcaggcccgttccccggtgcccacctgatttcaggaatgtcctcttccaagtccttgtccaggactctctccaactcagaaagtgcctctttgggatccagggtctccgggaactcctccccggccacctcctcggggggaagctcctcttctgggtcttctggtcccagctctgcattgtccaggtcctggcgttcggggtctgtgacccgccggctctcgtacacagagctctggaggccacgggggtcgccgtcctgctccctttccgacctgcccgcagcctcagagctgggctggttcccgagtgaccttcgcctgctgtcccccatacaccggtcccttcccagcccccgcggcctcactctcccggcacccaaatgtgtctgtggtggccgcggcaacaggagagcgtccgtcacattccccacggtccacattctaacccgtgcgccgtctccaatgctggtcacctgggcttgcgctgggatcaggactcagtcctggtggtcacggctcactcaggacctcccaggattggtttaggaaggagacctgacgggaacctgcaggggcatctagctatggattccctctctcaaaaggagacacaaggaagagaccgcgtctcctgttcctgtccctgtggggcccgtcggtaatgtccagagcccaggcagccttcttgtgaccatgaggcctgccatctgagggcagatgaactgaaaggtgggcctttgatgtggctgtcgagcctctgaacttagcagccttggaatccactctgtgtccaggcttcttgttacttgaaacagtaagtttccttagtactaagtcgttttggcttggtttccaattcctagcagctaaaactgcaccctaggtgatacagacgcttccagccccaacctctcatgagaaataacttcaaaataggctgttccaaccctcacaacaaaataatggttataactggagtattccccaggctgctgccttcaggaattcctcgtacgtcgccaaaggagctgaatttccagcctctccccctctgtgccccacccagcctctccccctgtgtgccccacccagcctctccccctctgtgccccacccagcctctccccctctgtgcccccacccagcctctccccctccgtgccccacccagcctctccccctccgtgccccacccagcctctccccccccgtgcctccacccagcctctccccctctgtgcccccacccagcctctccccctctgtgccccacccagcctctccccctctgtgccccacccagcctctcccccgtgtgccccacccagcctctcccccctgtgccccacccagcctctccccctctgtgcccccacccagcctctccccctctgtgccccacccagcctctccccctctgtgccccacccagcctctcccccctgtgccccacccagcctctcccccctgtgccccacccagcctctccccctctgtgcccccacccagcctctccccctctgtgccccacccagcctctccccctctgtgccccacccagcctctcccccctgtgccccacccagcctctccccctctgtgccccacccagcctctccccctctgtgccccacccagcctctcccccccctgtgccccacccagcctctccccctctgtgcccccacccagcctctcccccctgtgccccacccagcctctccccctctgtgccccacccagcctctccccctctgtgccccacccagcctctcccccctgtgccccacccagcctctccccctctgtgccccacccagcctctccccctctgtgcccccacccagcctctccccctctgtgcccccacccagcctctccccctctgtgccccacccagcctctccccctctgtgccccacccagcctctccccctctgtgccccacccagcctctccccctctgtgccccacccagcctctccccctctgtgctgtgtgcccccacccagcctttcacccttctgtgcttggtggttttctactcatcattgaagactcaagcctgtcggtcccccacgcagggagagtccctgaccatccctcccctttctgggctcccaggcctaggacccccacccctacccccacccagtgctagcccaccccgaggactgctctgtccctcacccctgccaccagcgtggggccggccctccgggcatggtgaccactcggcacgcaagagacccagttcatcgacacacacaaagccctctccagctcccatcccatctccctgatgctctgctcccagacgcagcctcaccaccacctctgtcaggaaaggggtctctcggaggactccaggcagaagggccccggggaggatccggtcccatcaaggaggccatgggaaaatcccctttcttggccggaagtctcgtaaacccttaccttgcactcaatgatttacttttctctcttaagttaaactggatcaagatctgcgggtgcctttcacaaagagatgagttaggcattgttgccgctggagggcctgtggccactgcagtgtttccaggagacctcgttcagagcagggcgccgcaccccgaggctgctccctaaccctactccagggaggcgcggttgggggtctggcagcctccggctctcagcacccaggcagcacccaggctgcagcgcgtttagccctcatggcagcccgttgtggagaggagaggcagatgagcgctccagggtcatggggaagctcccagggccacgcggctggtggagctgcacccggcaccttctcgggggagtcagggctggatgtctctacggcaggagccggaggagctcaggagcgcgcggggacagcagaactctgcccgcactcgggggagagttggagggtccacgtctgctccaacatcctgtggaaaagcaagacgttcacagccaaggaagtgcatgatttctgaatgttgtgtgatgttgctttgagcagaaaatagagggggacggggaccgggctgtgggatgtgtggggttctgactgcccggacctggggcgtccgcctggcagaaaataaaccaggtccctactgtgttcctctctgctgtggccgccttaacacatatcacaagcagaggctccagcaacactgagcgattacctggccgccctgggctcagaagcccaacatggatctcactggactcaagccacggtgtgggcagggctggttcctgcagccttcagaggaaggcccgtctcctgctcatttggtggccacagaattcagtgccttgtggtcgtaggactgagatctgcgttcttgctgtgtgtgtcagccgggggcccttcccagcgttgctgtgtgtgtcagctgggggccccccagcacccagaggccaccgctcttctcagtcctggcccctcgctccattttcaaagccagcaacggccagtcaagccccctcacatggatgctccactggcactcatctctgagcagggctgggaaacccgtttggttattacggaaacaggtgattgaaggtcagcctggataagccaggtgctctgaccctccacgtctgcaaccccagtcccacctgcgaagtccattttgccacataaaataacatgctcccagtgtcaaactcaaacgagcacatagagaggcatttttacgtaagacattttgtttgggaaaatacataaaaacagaattgagacctggcgcggtggctcatgcctgtcatcccagcactttgggaggct[133 bp omitted]gaggcaggagaatggtgtgaatctgggaggtggaggttgcagtgagccgagatcacgccactctgcaccccagcctgggcgacagggcgagactccgtctcaaaacaaaaaacaaacaaaaaaaaaccaaaaaaaacagaattgcaatttcgggcctgtacacagaccgggaggtcttcggtatatctgcagcaggttggggcttttactagaaggaacaatgttgcgaatcatttcgaaagaaagctcgcaagaactggaagctttgggagctggtgagctgtgactgggagggaggtgggggcagaagggacctggtgagctgtgactgggagggaggtggcggcagaaggcgtcttcatttagctgaggtcacctccacagctcccaggtcaaattggctttagggtcacggcaggcggtttcgggcgctggcctgtgacgccgtcctgggcaggcgcgtgcatctgaatgctttttacctggtctctcgactgttgcgttgggtaactcccatccatatcaccagtttcacaccaggttccagggacgaggatgtggacaccgttggggatcactattccttctgtgacacctacctcataccacacacaacagccctcagtggatacgtgaaagctgaaacacaacttcaaaacttacagaaaaaaatgaatgtgaccatgcttttgcgctccatgtagggagtaatttttttaacaagacatgtagagtgctaatcatacacgaccaataagtcggccatattaaactgaagcctcatgttcaggactcctcaaaaaagtggaaacagaagccacgaatgggaatgcagcatctgtcacatctataattgattagtacccaccatgaataaata[133 bp omitted]ggtgaaccccgtctctactaaaaatacaaaaacttagctgggcgtggtggcgggcgtctgtaatctcagctacttaggaggctgaggcaggagaatgacttgaacccaggaggcggagtttgcagtgagccaagatcctgccactgcactgcggcctgggttacagagtgagactcctctcaaaaaaaaaaaaaaagagcagaaccctggtgatgagcagatgtaggacgtggggcagaaccgtggtgattgatgagcagatgtaggaggtggagcagaaccgtggtgattgataagcagatgtaggaggtggagcagaaccgtggtgatgagcagatgtagggggtggggcagaaccgtggtgatgagcagatgtaggaggtggagcagaatcgtggtgattgataagcagatgtaggaggtggagcagaaccgtggtgatgagcagatgtaggaggtggagcagaatcgtggtgattgataagcagatgtaggaggtggagcagaaccgtggtgatgagcagatgtaggaggtggagcagaaccgtggtgattgataagcagatgtaggaggtggagcagaaccgtggtgatgagcagatgtaggaggtggagcagaaccgtggtgattgatgagcagatgtaggaggtggagcagaaccgtggtgattgatgagcagatgtaggaggtggagcagaaccgtggtgattgatgagcagatgtaggaggtggggcagaaccgtggtgatgagcagatgtaggaggtggagcagaaccgtggtgattgatgagcagatgtaggaggtggagcagaaccgtggtgattgatgagcagatgtaggaggtggagcagaaccatggtgattgatgagcagatgtaggaggtggagcagaaccgtggtgatgagcagatgtaggaggtggagcagaaccgtggtgatgagcagatgtaggaggtggggcagaaccgtggtgatgagctgatgtaggatgtggagcagaaccgtggtgatgagcagatgtaggaggtggagcagaaccgtggtgattgatgagcagatgtaggaggtggagcagaaccgtggtgattgatgagcagatgtaggaggtggagcagaaccgtggtgattgataagcagatgtaggaggtggagcagaaccgtggtgatgagcagatgtagggggtggggcagaaccgtggtgatgagcagatgtaggaggtggagcagaatcgtggtgattgataagcagatgtaagaggtggagcagaaccgtggtgatgagcagatgtaggaggtggagcagaatcgtggtgattgataagcagatgtaggaggtggagcagaaccgtggtgatgagcagatgtaggaggtggggcagaaccgtggtgatgagcagatgtaggaggtggagcagaaccgtggtgatgagcagatgtaggaggtggggcagaaccgtggtgatgagctgatgtaggaggtggagcagaaccgtggtgattgatgagcagatgtaggtggtggggcagaaccgtggtgatgagcagatgtaggacgtggggcagaactgtggtgattgatgagcagatgtaggaggtggagcagaaccgtggtgatgagcagatgtagggggtggggcagaaccgtggtgatgagcagatgtagggggtggagcagaaccgtggtgatgagcagatgtaggaggtggagcagaaccgtggtgatgagcagatgtaggaggtggagcagaatcgtggtgatgagcagatgtaggaggtggagcagaaccgtggtgattgatgagcagatgtaggaggtggagcagaaccgtggtgatgagcagatgtaggaggtggagcagaaccgtggtgatgagcagatgtaggaggtggagcagaaccgtggtgatgagcagatgtaggaggtggagcagaatcgtggtgatgagcagatgtaggaggtggagcagaaccgtggtgattgatgagcagatgtaggaggtggagcagaaccgtggtgatgagcagatgtaggaggtggagcagaaccgtggtgatgagcagatgtaggaggtggggcagaaccgtggtgatgagctgatgtaggaggtggagcagaaccgtggtgattcataagcagatgtattaggtgttgctgttgctggggctgtggcaggaagtggttgatcacattcctattctccagttgggtaatgagctcatggttgaatcgtgaatgggtaaatgaatgggtggatggaaataattatggttcacctaattttatgcccctaaggtccttgcaaaagaaaacggagggaggagagagaggagaaaggggaagaagtcgcattcaaattcactctcgccagtctctaaaatggcagattcgttttgaaacaactccagattaagcctacagagggaaggcatggctgattctgctgagcacctattacagcttcagcagcatacctcgtttcggtccacaacagctgtgtaagattgtgacggagctggaaagttcctgttgcctagtgaggtcatgtcctagcgcagaacgcagaatcacgaagagtgacgaatgcccgccgtcaactgctggccgggctgcgtgtcatgcagcaacgcacaacggaagcacacccttctcctgttcccagtggtcagagccacccaagtcgggggtgtgggcccccagcacttctacttcaggatggagaccccctgctgcctggctccctccccaggcccgccaggctagtcccctcccctgtccctctctcaggcctgctctcatagccacgcgggcctttctgctgcacacgccagctcagttcggggctcagtaaccccctcccaattcaggggcatgactccttccagattctccttaaatatcacctcctccaaaaagccttccccaatcacctcgtctaaagtagggccccctcatttttctacctaaatctatggggagtttgtttgcttagttgcatgtatcatgatcttgctttgtgttgactttttacatatttattgtctttttatctcattagcatatgtgctccaatagggtggagactgtgatttatcttgttcatgcctggacttccagcagcattcagaacagaacttctttctttctttctttcttttgagatggagtttcgctcgtgttgcccaggctggagtgcagtggtgcgacctcggctcgccgcaacctccgcctcttgggttcaagcatttctcctacttcagcctccggagtagctgggattacaggcgcgcgccaccacgcctggctaattgtatttttagtagagttggggtttctccgtgttggtcaggctggtctcgaactcccgtcctcaagtgatccgcccgcctcggcctcccaaagtgcagaagagaattccaggaagcctcgagagtgagtgacggcccgcggcccccggcgaggaggcagcaataccacaggcgaccaccagctgccgccgcagtcaagggcagttggtctcccctcgccaggattaaccctggaccgagggctcccgaaccgaatcgtccccacagcctgtcctgcgagggcggctttccccattaccaccctcgtttcaccaaggagaaaacgagctcagagaggcagtgcattggcccgggattgcaccgggcgcgaacccacgtcagctcccgcagaacctagatcattcgctgccacctccctccgggcctgctctcgcagtgttgggtgggaacagaacagccttggtcgtggctgaggagaaatcccacagatgtcactggacgagggtgacgggtggggccgggctttcccctgggtacaggcacaaccgtgctcttccctcgcacagtgacccgcggtgtcatccacaattcacagcctgtttcccagaggaggggctcggagcggtgccctccaggtgccgccagcaacacaaggcccagactacagaacaccaaatactgtgatgagaaattacttcccttttccttcagggccagtcctggctaccccaaggggaaagtcgcagcttggtgcaaatgaaagttcaactgtccccagcattgtcaatggtttttacagagagagagcaggcccaagcctggggcagagcataggagctggttagtaaccttgttttgttctcactgctgtttgtttgcatgcctttctggctttgtttgtgttgttgttttgaaataattgcgaactttcaagaaaagtagtatcattttgaaagaaagctccctggaactgatgaagtgggagggaggtgggggcagaaggcgcctggtgagctgtgactgagagggaggtgggggcagaaggcgcctggtgagctgtgaccgggagggaggtgggggcagaaggcgcctggtgagctgtgactgggagggaggtgggggcagaaggcgcctggtgagctgtgactgggagggaggtgggggcagaaggtttctttgtgtcactgaggtcacgtcggcaaacatagttatcgttatcctcctatttgcctagggaaagcaccaggatgtttaatgcctacagtccaaaattggttggtggaagtacctactgtcagtcccatcagtagattcacttatcacatggtaagcgggatgtcactcaggccacgggtaaattatttacaagacttttcttatcaaagatcattaaaatttagacctatagggaaaccttgccccaaggaaattcccaaaggatcaaaaaatacagaagttttagtttggaaagaatgtgtggccaatagtgcggtgatattacaaaacaatgaattcggaactattatagattgggcacctcgagtcaattctaccacagttgctcaggacaaactcggtcgtgtccaagtgcacaagtgagtccagctgttgatagcgacttaacagaaactctagacaaacataagcataaaaaattacagtctttctacccttgggtatggggagaaaaaggaatctctaccccaagaccaaaaataataagtcctgtttctggtcctgaacatccagaattatggaggcttactgtggcctcacaccacattagaatttggtctggaaatcaaactttagaaacaagagattgtaagccattttatactatccacctaaattccagtccaacggttcctttacaaagttgcgtaaagcccccccttatatgctagttgtaggaaatatagttattaaaccagactctcaaactataacctgtgaaaactgcagattgtttacttgcattgatttgacttttaattggcaacaccgtattctgctggggagggcaagagagggcgtgtgggtccccgtgtccacggactgaccgcaggaggccttgccatccgtccgtattttgactgaagtattaaaaggcgttttaaatagatccaaaagattcatttttactttaattgcagtgattatgggattaattgcagtcacagctacggctgctgtagcaggagttgcattgcactcttctgttcagtcggtaaacttttaatgattggcaaaaaaattctacaagattatggaattcacaatctagtattgatcaaaaattggcaaatcaaataatgatcttagacaacctgtcatttggatgggagacaggctcatgagcttagaacattatttccagttacagtgtgactggaatacgtcagacttttgtattacaccccaaatttataatgagtctgagcatcactaggacatagttagacgccatctacagggaagagaagataatctcactttagacatttccaaattgaaagaacaaattttcgaagcatcaaaagcccatttaaatttggtgccaggaatggaggcaatcgcaggagtggctgatggcctcgcaaatcttaaccctgtcgcttgggttacgaccatcggaagttctatgattataaatctcatattaatccttgtgtgcctgttttgtctgttgttagtctgcaggtgtacccaacagctccgaagagacagcgaccatcgagaacgggccatgatgacgatggcggttttgtcgaaaagaaaagggggaaatgtggggaaaagcaagagagatcagattgttactgtgtctgtgtagaaagaagtagacatgggagactccattttgttctgtactaagaaaaattcttctgccttgagattcggtgaccccacccccaaccccgtgctctctgaaacatgtgctgtgtccactcagggttgaatggattaagggcggtgcgagacgtgctttgttaaacagatgcttgaaggcagcatgctcgttaagagtcatcaccactccctaacctcaagtacccagggacacaaacactgcggaaggccgcagggtcctctgcctaggaaagccaggtattgtccaaggtttctccccatgtgacagtctgaaatatggcctcgtgggaacggaaagacctgaccgtcccccagcccgacacccgtaaagggtctgtgctgaggaggattagtaaaaggaaggaatgcctcttgcagttgagacaagaggaaggcatctgtctcctgcccctccctgggcaatggaatgtctcggtataaaacccgattgtacgttccatctactgagatagggaaaaaccgccttagggctggaggtgggacctgcgggcagcaatactgctttgtaaagcattgagatgtttatgtggatgcatatctaaaagcacagcacttaatcctttaccttgtctatgatgcaaagacctttgttcacgtgtttgtctgctgaccctctccccactattgtcttgtgaccctgacacatccccctcttcaagaaacacgcacgaatgatcaataaatactaagggaactcagaggctggcgggatcctccatatgctgaacgctggttccccgggtccccttatttctttctctatactttgtctctgtgtctttttcttttccaagtctcttgttccacctaacgagaaacacccacaggtatggaggggcaacccaccccttcacaggtcaaattggctttaaggtcccagtaagaactctgtgtgtccttcacctggtcacccgctgtgaacgacctgccgccctgtgttatcctcctgtcggttttttcctgaacatttgaagctaagttgtagatgtcatgcacctccacccctaaaaatttcagtatttatgtatttctttatttttgaggcagtgccttgctctgtcatccaggctggagtgcaacagtgaatctccacacactgctgcctcaacttcctgaggtcaagcgatccccccaacgcagactcccgagtagctgggaccacaggggctctgagtctcagcgtcggccgtgtgtcctcgagtacacatcagggtctcagcctcggccacgtgtgtctgtgagtacacagcagggtctcagcctcggccacgtgtgtctgtaagtacacggcagggtctcagcctcggccgcgtgtgtctgtgagtacacggcagggtctcagcctcggccgcgtgtgtctgtgagtacactgcagggtctcagcctcggccgcgtgtgtctgtgagtacacggcagggtctcagcctcggccgcgtgtgtctgtgagtacactgcagggtctcagcctcggccgcgtgtgtctgtgagtacacggcagggtctcagcctcggccgcgtgtgtctgtgagtacacggcagggtctcagcctcggccgtgtgtcctcgagtacacatcagggtctcagcctcggccttgatcatctatccttgttatataataagctcacataaattagtaacaggtcaaaaccccggcaggaggatgagtgagaacttggatgagcaagttacaaatggaagaaatacggtggccaagatcttaggaaca[213 bp omitted]gagggagaagaatcacttgaacccgggaggtggaggttgcattgagctgagagagacagagagacgtgcagggttgacaaggatgggctggcgtgggggcaggccccacaccctcagccctgcacgggcgcagccctcagaagggaactgggcggcaggtacctgcatcacagatgctccgtccttgggcccaggatcttcacccccagtcatctgtcttgtggagtgtgtcgctatgaagaggtccctgaggctgggtcgttcataacgaagagggttcatttgctcacggttctgcgggccgtacaggaaatgtgacaccggcctctgggccgcttctggggaggccggggaggtttacccatcaaggaaggtgaagagggagctggtgtgtcacgggtgagagggagcaagagggaaggtgccgcactcctaaatggctctcaggtgagcaacaggcaggacgggggacggtgccgcactcctaaatggctctcaggtgagcaacaggcaggacgggggatggtgccgcactcctaaacagctctcaggtgagcgagagttagcaagggggaaggtgccgcaatcgtaaacagctctcaggtgagcaagaactcaactcacgtgtcaccaagggcatgggctaagccctgcaggcgggatctaccccgtgagccagcacctcccaccaggcctcacaccaactctgggcgtcacatttccgcatgagatttggagggacacatgtgtccaaacatgtcacagagcacgtagtcagtgacgttcacacatgaatattcatcccagatttactcatggtaatgaaaccctcaacacgacagcagagtttgggtgtgttcctaagagcgggtggtttgcagatgttcacctcatccaaaaacatcctcacagacctgcccagaatgatgtttgaccaaacttctggggatcctgcggcccagtcgagttcacacaaaaaattcaccaacacactcggcattccggggaagctggggacgcgtgaggggccaccaggtggctgcagagacagtgtctgagctgtgaggtctattttcagcccaaagagtcggcttctggggaacagcccaagatgcccttggaggagaggctgggacgagtcccccagtccctctgcagccccaacccccaacccagcccttgacaagcccctcccctccagacacagggcaatgcccctctccgtctctctgtctctctctctctcccctccctctttctctgtcctccgtgtgtctgcctgtcctctgagtccaccactggcctcttgcacgtgccctgcccgtggctcctgccctcacgtctctgctcgctcccgtatcccccatgagctggttctgggaggccgcggtctggcttgtggggacccatccatttctctcctggggcctgagctggggttggggttctagagcagcgcaggccaagaccccacggtaatgggagacagaggtgggtagagcgtggcctccaagacatgattctgaacaatgcagacccatggctgtaacagatgcagcccatgtagcctgagagtagggtcactgtacaactacagatgccatcaacaaaactccgtgtagcaacatcctcccactcagtcctcgagcagccctgaaggcacagccaccattgctccctgtcacagatgggaacaccaagacagccaccattgctccctgtcacagatgggaacactgaggcgagtcctcgagcagccctgaaggtgcagccaccattgctccctgtcacagatgggaacgcggaggtgcagggacatcggtggctccccagggcccggctgtgagcagctctgatgtggcagccccttctccccagcattggggtgcggtcaagcccgcggactgggcaaccgggctctgcttcctccgcgcttgccaagagcctcagaaggaggccgttcctcatctgtgcacacgagggctggacacagacacacagcacactgcgcccacgccatggccagcctgaggcagacatcagcagccgaatgctgagggccacactgtttccctctgagccctggcaaggcctcagaacccttctcaacccttagccaaggccaagtggtctgagaggcccaggagcttcactctgtggtcctcagggtgccattaacccgaccccagggccagcggcacctccaggcctggccccccggcccccgccccggcccccgccctggctggctcccagcccacgctgctccactgcaggcccggccagcagcatctgttgccatggtacctgctggggtagcaaggcccccccacccacagtgggacatcaccacagcagccggtgagatttaaatgcaggcagcggattagatctgagcgttgtgtggatgtggaatttcccgatgttgacaacagccccagggttataaaagagaatcctggtttttagaaaagatacgctgatatgtttaggaggaagtgggcattgcacctccagcatagtcttcaatggttctgaaaatgtgtataaatatgaatattgtaccatatgtagataacaggtggctgtagatacagatagaggtacagacaccgaagatgacacagcaaatggggaaaatccagcccgctggtgactctgggtagagtcagggggagttcctgctgtatgacaagtaatcttgccactttcctgtaaggtcaaaatgatatcaaaactaaaagatgtgaaaacaatattcaaagcatagagtcttgggccagccccccaccttacctcctacagagaccccaactctgcaggtctagatgagctcagactttgatttaatcagcatcaaggagagtatgatgggttgagttgtgtctccccccaaaacacggtccatccctggaacccatgagtaggaccttatttggaaataaggtctttgcagatgtgatgagttcagatgaggtcaccctggagtccggaggaccctcaatctgatgaccggcgtctctctaagatgaggagtgggctcacaacactctcaggggcaacggccgtgcaaggacagaggcagagactggactgaggcatctacaggccgagggccaccggccaccaccaccagctggagaaggacacagacgcagtctccctctgagcctctggaagaagccagccctgccgacacctggatggcaaagctctggcctccagaaccgggaggacacatctctgctgtgggaacacccaggccatgtgcctttgctacggcagccccaggtggcagctgctcagtccgcgaggaggggcagcactggccacgtccaaaagcttccggaagagcgggcagggtcctgcacagctgttcattcacccgcgagtacgtcaagcatacattgggcaccgactgtgtgccacgcccgtcccggcagaggccctggggacccagctgtgaacaaaatcggcaaaatccctgccctcctggaggtggcgtcttagtggggaagacaggcaagaaacacgattggtgaattgccgggagaacgcggcagggaggagatggtagagtcgtggggaaggcaggaaggtagggaggtcggagaggccttcccaggaaggggactttggacaaagacagaagtgaaggaggtgaggaagggactgggaggtgatcaggggagagtgcaccaggaggaaaagcctggaggtgggatggggccagagcctgcagggacagcggggagataccaatacacaatggggtgagtggggctggggaggagggcatcggcgtggtccccattccgtggggcccgtggctctacaggaacagccgtccctgagtttggatagacgtctatgcagccctgtgccaggcaggcacctccctctctgcagcagctctctctgggcctgcaggctcctcagaacacgcatgcctcgaaggtcttccctggccttaggggtggagtgtgtgagggtctccacgtgagggaccacgtgggcaggcagtgccggcagccctgccccatgtgctggtgtaatctgaggtttgctctcccgtcgcccaccctcattattgtgcaattaaacacttgaggcagaggatgacgaggttaaaaatagcccttcctttcagccagagagagcccgtgagtgtgagtgggtgtgaggagggcctgggggccgtggaggtggtgtctgcagctgcctgtgaaggtgggaagaggccccaggcccccatcctgttgatttctcagaaaaacatctgagcaccttggccatcacacacatttattccgctaaaacttgaacacttgctgtgtgtcaagcacggttctgggcctgggaagaggctgggaggtggtcctggcccccacagagtgctgagaagaaagcaaaggagagttgggggaggatggaggcagggaaggccactgaggtgaaggccgtgagggtgtctaggaagagcacagcatgagcaaagactctgagaccaacgtgcctgctgtgcagatggaaccaaaagcaggcccatgtggctgcagcagactgagtaagggagagaaagggaggaggtgagagcaaggaggtggccaggcaggtcattcagggcctggtgggaatgggaaggagttgggtttttaccgtgacagagatgggagagacggaggtcagtgtacagagtcagcaggtggcaggcctggtgctcacagtccagagaccagggatgaggcaacagagctggtctagggacaaacaatggaacagatgataaggaaggatggtgggggtgtgtgatgatggggaaggatgacggtgaaggatgataggaaaggatggtgggaaaggatgatggagaaggatggtggggataggtggtgatggggaaggatgatggagaaggatgatgggaaggatgatggagaaggatggtgggaaggatgatggggaaggatgatgggaaggttgatgggaaggatgatgggaaggatgatgggaaggatgatgggaaggatgatggagaaggatgatgggaaggatggtggggataggtggtgatggggaaggatgatggagaaggatgatgggaaggatgatggagaaggatgatgggaaggatgatggagaaggatgatgggaaggatgatggagaaggatgatgggaaggatgatggagaaggatgatggagaaggatggtggggataggtggtgatggggaaggatgatggggaaggatgatggagaaggatgatgggaaggatgatggagaaggatgatgggaaggttcatgggaaggatgatgggaaggatgatgggaaggatgacgggaaggatgatggggaaggatgatggggaaggatgatggggaaggatgatgggaaggttcatgggaaggatgatgggaaggatgatgggaaggatgacgggaaggatgatggggaaggatgatggggaaggatgatgggaaggatgatgggaaggatgatgggaagggtgatggagaagggtgatgggaaggatgatggggaaggttgatgggaaggatgatgggaaggatgatggggaaggatgatgggaaggtgatggagaaggatgatgggaaaggtgatggtgaaagatgacaggatgggtgatgggaaggatgataatgagaaggataatgagaaggacaatggggaaagatgatggggaaggatgactggaaagacaatgggagagatggggaaggaggatgggaagaatgacagggaaggatgatgggaggatgactggagaggatttaacagaagagaggatggagaaggaagatgggaaggatgatggggaaggatgatggagaaggatgatggggaaggatgatgggaaggatgatggagaaggatgaagggaaggatgatggagaaggatgatggggaaagatgatgggaaggatgatgaggaaagatgatgggaaggatgatggggaaagatgatgggaaggatgatggggaaagatgatgggaaggatgatggagaaggatgggaaggatgatggagaaggatgatggggaaagatgatgggaaggatgatggggaaagatgatgggaaggatgatggggaaagatgatgggaaggatgatggagaaggatgggaaggatgatggagaaggatgatggggaaagatgatgggaaggatgatggggaaagatgatgggaaggatgatggggaaggatgattgagaaggatgatgggaaggatgggaaggatgatggagaaggatgacggagaaggatgatggggaaagataatgggaaggatgatggggaaagatgatgggaaggatgatggggaaggatgatggagaaggatgatgggagggatgatggagaaggatgatgggaaggatgatgggaaggatgatggggaaagatgatgggaaggatgatggggaaagatgatgggaaggatgatggagaaggatgatggggaaggttgatgggaaggatgatgggaaggataatgggaaagatgatggggaaggatgatggggaaggatgatgggaaggatgatggagaaggatgatggggaaggttgatgggaaggatgatgggaaggataatgggaaagatgatggggaaggatgatggggaaggatgatgggaaggatgatggagaaggatgatggggaaggttgatgggaaggatgatgggaaggataatgggaaagatgatggggaaggatgatggggaaggatgatgggaaggatgatgggaaggatgatggggaaggatgatggaggatgatggagaagggtgatggggaaggatgatgggaagaattatggagaaggacgatgggaaggatgatgggaaggatgatggggaaggatgatgggaaggatgatggggaaggttgatgggaaggttgatgggaaggatgatgggaaggatgatgggaaggataatggaggatgatggagaagggtgatggagaaggacgatgggaaggatgaatggagaaggacgatgggaaggatgaatagagaaggacgatgggaaggatgaatggagaaggatgatgggaaggatgaatggagaaggatgatgtgaaggatgaatggagaaggacgacaggaaggatgaatggagaaggacgatgggaaggatgatgggaaggacaatgggaaggatgatgggaaggatgaatggagaagtatgatgggaaggatgaatggagaaggacgatgggaaggatgaatggagaaggttgatgggaaggacgacgggaaggatgaatggaatgggtgattgggcaccaagtgagagcattcggtgacacctttttttttttttttgagactcccttttttttttttttttgagacggagtctcgctctgtcgcccagtctggagtgcagtggtgtgatctcggctcactgcaagctctgcctcccaggttcatgccattctcctgcctcagcttcccacgtagctgggattacaggcgcccgccaccacgcctggcaaattttttgtaattttagtagagagggggtttcaccgtgttagcca[134 bp omitted]ttcgcaatgttgtgcaactataact[224 bp omitted]tgaggcaggagaatggtgtgaacccgggagcggagcttgcagtgagccaagatcgtgccactgcactccagcctgggggacagagcgagactccgtctcaataaataaataaataaataaataaatagtcagtgtcttgctttttggcccaggctggagtacagtggcatattcacagctcactgcagcctccaattcctgggctcaagggatcctcctgcctcagcctctcacgttgctaggattgtaggtacaagccaccatgtgtagctccccaaaccattcttcttatctcagaaagaaatcctctggatttagctatatttgacatttcatgtaaatataagcagacaatatgcgtccttttggcctgagttttttcactgagtgtcatgtttcaaggccgtgctccattttttttgtgattgactactattccagcctacgaatatgccgcacggtggttcatctctctctgccgatggacatttgggctgtttctacgtttcgaatgatgtaaacgagctgtgtgtcttcttcaataaatgcccattgaagtcttttgcctattttttaatggggttgttggtcattttgttgctgagttgtatgcatagtttatgtgttctggatacttgatcctgatgagctcagtgaacatttataaacaaactgaccatagcagcccccactccaatgaaaacgccacctgtgacggcccccagaggcccctcgtccctcctggtccctgccccgggggccccatcctgacttccattgctggcagcgggtaggttcatgtcggctgctcttgaattcctcctgcctgggctgccccgcgtgatccactgagtgtggcagagacgtgtcgtgctgctgccttcagcagctccacctgcttgctgagaaggttcccggtgcgtttggaaggcagaggctcctgggcttgcaggtaggtgaacgcgctgacagagaggactcggccggcgcaccccctcacccccgtccaccatcctgaacacctagtcctcacacatcctggaagatttgcagcctcagtctcttccaaatgtgtcttactcctctctgctcaccctggtgccaggcatccgcctttgcccatccagacccagcaccagtgccctgccctccccttggcttctgtgctgcccggccatgccccttccttccagacagttcaggtcatcctaaaacgttcatccaagccctttgcccacaggataaagtccacactcctcttacagtcctgtgacccacaggcctccttggaattttggggctgagtcctttctgctctggggcttcacaacccttttgtcctctggcctcctcttccaggaagtcctccaagggcaagccttgcaggactcagactaggcacccaccccaatgcttgtcgatgagaaagcctcagtcaggaaggaactcgggcagaccagggatggtgcccctgctccatgacatctgggagtctgctctaagaccaggaggctggggcccacctgggctgccagctgcacctgcctccctgggccacctccttttcatggcctgggtttggaagctacccactgccactttgtattgcgcggagcagtctggaggggacaggcccagtggccactgctccatggggtgagtctcagctctggagagcgcagggccgggaacatcatgtcagggacaccctggagctgtggtatccccgacacgagcataaggcacagcagcactcagtccacatttgccaaaggaaaggggaacagccaacacgcatgacccctcaccgcgtgcagacgacgcgtgacccctcaccgcgtgcagacgacacgtgtgaccctcaccgcgtgcagacgacacgtgtgaccctcaccgcgtgcagacgacacgtgagaccctcaccgcgtgcagacgacacgtgagacccctcaccatgtgcagtcaccttgctaggcagcttatgtgccttctctcgtttcatcctcaggtttgggaaaattatccagaacttggaaaggggtaaaaacatcactgcctgctctttggatcctggaccctcggcacggtgggcctcagagctgatcattccctggggtggggccgtcctgggcactgctgggtgctgagcagtgtccctggcctccgcccactccacaccaggagctcccctagtcgtgacaaccacagaagccccagacgttgccccgtgtccccgaggggccgaatcacccagaggatcagttgtattccagagcctcgaccagcccggccacccgggggtcactttgtggacgcttccctccactcttgccagtgtcctggctctggggttggacgctgcttgggattgacaaatgcggatgagttttgtccctgagcggcaggtgcctccttcctcctgctgcgtataaaactcagtccagtcctgccgttccttagtaaacactcggacgcacctttgacctacagtggcccgtggtctgaatgaggtttatgcgtgagtgctttgaaagctcaatgttgccatcacctgaagcctagagggcagtgtgcactgggcacctcacttacacaggaggaaactgaggctcagagagggggaggggctggcagtgtgggagctgcagtccttgatctgagctgtccccgtgactttgggagatgaggaaggagcattctgtggcttggctgggggagcccaggtgggaggggagggtggggacacagtggctggtgggcgggggggtgcctctgagccgcctgggccacaggcaaaggggttagggaggtgagaggggagcttgggggcaagggtcatgtgtctccacggccgggcaggtgcacactcccagggaggccacgaggactctgtggcccggggattggagtgaaccacgctgaaaggtcagagggcagtgtcccaacaacagtgcccccgttccagccccaacggcagcccaggggttcccaggcccaccctcactcttgcaggggtccccaggcccaccctcactcttccagggttcccaggcccaccctcactcttccagggttcccaggcccactctcactcttccagggttcccaggcccaccctcactcttccaggggtccccaggcccaccctcactcttccaggggttcccaggcccaccctcactcttgcaggggttcccaggcccaccctcactcttccaggggtccccaggcccaccctcactcttccaggggtccccaggcccaccctcactcttccaggggtccccaggcccaccctcactcttccagggttcccaggcccaccctcactcttccagggttcccaggcccaccctcactcttccagggttcccaggcccaccctcactcttccagggttcccaggcccaccctcactcttccagggttcccaggcccaccctcactcttccagggttcccaggcccaccctcactcttccaggggtccccaggcccaccctcactcttccaggggttcccaggcccaccctcactcttgcaggggttcccaggcccaccctcactcttccaggggtccccaggcccaccctcactcttccaggggtccccaggcccaccctcactcttccaggggtccccaggcccaccctcactcttccagggttcccaggcccaccctcactcttccagggttcccaggcccaccctcactcttccaggggtccccaggcccaccctcactcttccaggggttcccaggcccaccctcactcttgcaggggttcccaggcccaccctcactcttccaggggtccccaggcccaccctcactcttccaggggtccccaggcccaccctcactcttccaggggtccccaggcccaccctcactcttccagggttcccaggcccaccctcactcttccagggttcccaggcccaccctcactcttccagggttcccaggcccaccctcactcttgcaggggttcccaggcccaccctcactcttgcaggggttcccaggcccaccctcactcttccagggttcccaggcccaccctcactcttccaggggtccccaggcccaccctcactcttccaggggtccccaggcccaccctcactcttccagcggttcccaggcccaccctcactcttccagggttcccaggcccaccctcactcttccagggttcccaggcccaccctcactcttccaggggtccccaggcccaccctcactcttccaggggttcccaggctcaccctcactcttccaggggttcccaggctcaccctcacgcttgatgatttgcgaggacgcacggaactcccagcaagctgtcctcgtcacaggtagggtttgtcacagtgccggggtgcaggtgccgtgggctggggaagagcacatgaggcagcgtcccggagaagccccgtggtcctgtccggggaagccgggaactgctcactcacagggcgcacggaccaccaggaaagggcacggcagcctaggcgcccagagctctgcgagggatccctcgtgggggcttgattgactgattgcttgccacggggttgccctcgaactccaagggtgtctgacgctgtgagacccaaggcgctcccaagtcccacggttggtcttgctggtgtgaccctccctaccccagaccaagacgctcccctcaggcagggcagaaatcacctcccaaagccaaggcaaagcccagacctcaccccgcacgagaggattcctcaccccacgggggaaggtgcgggtctcatccgtggcaccgcagcagggctcagccggtgaccaggactgggtgccacgggtgctgggtccgtgcccactccagccccaccagcaggcagggagggtacagggtgctgcagaggaaaccgagtcacagagaacggagggacttgtcaggattctgacccatggctggcagagcacagctccctggggccctctctgccagatggcaggggccggccatgcaagcaggtgtccagtcccacccaggaagggcagcgtgggtccagccctggtccgaattcctgtcctgtcagctgggaggtgtgcgcaggcccctttgccttctgtgcctcggtgtttccatctgtggatggcagtaggcagcgtcttgctgaggattcagcgggtcctcccgcccacccacccacgatgcgcttaatcaacaggccctgccctgcgtgtgaccctggagagaggctctgggaccacgtcactgtacagtagggtaaactgaggctcaggcgccggcccgcgggaatggcccgccctcgtgggaggagcatgtgtgcgggtcggcgtccgcctcctcctttttattgaagtcatttttctcctcctgtcagcggaactggccgtgggcagcccctccctcccacccccaggagctgagaagaaaacaaaagcttaatcgaatccggcactggggcggtgggtgccgcagagagaggccgagggagcccccgcctgggtgggtctgaggccgcctgtaattatggccctgatgtgattatattaattatcgtcgctattttgtgccggcttccgcccggcgagcctgtggattgagctctactgcacacaagccgccagggctcatcacagacagagccttcggcctcgggagcctgagacccagagaagccacgcactgccccgggccacaccccacgtggaaggtggggcttgaaactcaccctgcggctccccacacacgtcagggttagaggttcaaggccccagagaggacaggccgcaaggcaggggccctgggaaggtgttactcctcctcctcggatgggagagacccactg[216 bp omitted]ggggcaggagaatcgcttgaaccctggaagaagaggctacagtgagccgagactgcacctctgtactccagcctgggcgacacagcaagactccgtctccaaaaaacaaacaaacaaaacaaaacaaaaaaactgaaacaagccggcttgagcaaacaaggcactttaccggcccaccctctgagctgaaatggtgcgcagttatggacttcaggcatagctggatccaggtgtccgcaatgtctccaggcttctgactcttcatctgttgttccctatgatggctcccctctgaagaaggggcatctttttgtaatttgcaccaaacggggtgccccccgcttgtggtgcccatggccttcctgagggtcgggagactcaggatggccgccagtctgaaaggagagactgctggcaggtgtgcctgcctccttcaccgcacagcacccactggggccgagcgctctgtggcgccagggatgctggaggtgcaaacagtagattcgttctgctcaggatcaacatcacaaggcagcaaacggccacagccaggagggaacaagggcatctgactcccccggggtgggggctgacctgaagggcagtgggccaagacctgaggcagggcgagacaccacgcaggcgcagaatccctggatgacgcccacttggaagtggaggggggagggcatgggcagctgcagctcccagacaccagcacacacaaacgcacacacaagtgcacaccagcagcgacacaggcacacacaagcgcacacagggtcacacatgcatacacggctcacgtgcttacacgtgcacacgccagcacacaggcagctatactcgagtgcctgcaggcgctcacctggcactgtcacatacgcccaacagatgagcacggtaacggcacacgcagtcacactgcacacacatgcggaagcacatggcgacgtgtgtgcacctacctggcacgcacacgcacacacccgtgcagcctagcgatgagtggctggggctgaagaggctacaaggcgcccgtagccctgtcaacccgtcccaggccctgactggggctcaccaggccgcggtcaggaggccgggctacgctgaaccccaattcccaaaagctcctggtggatttgagatggcagagacatctggaccccatgggcagcaggagagacagagcagcccagcctgggctgagagcacagggacgggtcctgccccgaggggtgtgagggggggacggggtcctgccctgaggggtgtgggggggacggggtcctgccctgaggggtgtgggggggacggggtcctgccccgaggggtctgagggggggacggggtcctgccctgaggggtgtgggggggacggggtcctgccctgaggggtgtgggggggacggggtcctgccctgaggggtgtgggggggggacggggtcctgccctgaggggtgtgggggggacggggtcctgccctgaggggtgtgggggggacgggtcctgtcctgaggggtctgagggggggacggggtcctgccctgagggggtgtgggggggacggggtcctgccctgaggggtgtgggggggggacggggtcctgccctgaggggtctgagggggggacggggtcctgccctgaggggtgtgggggggacggggtcctgccctgaggggtgtgggggggggacggggtcctgccctgaggggtgtggggggggcacggggtcctgccctgaggggtgtgggggggacggggtcctgccctgaggggtgtgggggggacggggtcctgccctgaggggtgtgggggggacggggtcctgccctgaggggtctgagggggagacgggtcctgccctgaggggtgtggaggggggatggggtcctgccctgaggggtctgagggggggacgggtcctgccccgaggggtgtggaggggggaacggggtcctgccctgaggggtgtggggggaacggggtcctgccctgaggggtgtggaggggggatggggtcctgccctgaggggtgtggaggggggacggggtcctgccctgaggggtgtgagggggggacggggtcctgccctgaggggtgtgagggggggacggggtcctgtcccgaggggtgtgggggggggacggggtcctgccctgaggggtgtggggggaacggggtcctgccctgaggggtgtggggggaacggggtcctgccctgaggggtgtggaggggggatggggtcctgccctgaggggtgtgaggggaacggggtcctgccctgaggggtgtggggggaacggggtcctgccctgaggggtgtgagggggatacggggctgtgtctagagggggtctgtggagacagggtcctgtctgaaggttctgaggggaggcgggacccaccctgtagggaccgtgtggggtccgagtcctgtttcctgacatccatgtagtcaagagctggaaccgtgaagcagaacccagacctgccgctccaagggaggtggtttatcaggggctgggctcctgcccccgcctgcctccacccggggcaggagaatgcggagggcagtggaaaggaccttgccaatctggaatcctcttctccttcctccctggagttcaccgcagaactctctcgttattaaacagccagggaagccaacctccacccccgtattcccgaaacacctttattgcactataaacagcatttataaacaaacacagctggggagtgtcttaaagatttacccacagtcaacctcagacactaagatatcaaagagtgcaggggggctactaaacgggggaccccagggagaacagggcctgggaggggtgagcatcagagaaggcggggagcgccggcgtctctctccatgcagggcaccctccccgcctccccggcctgaggagcctccgccctgggtgccctggcttccgggagagagcggagccctgcaacaccaggctcagaaggggcctgcactctccctctggagggctcacaggtgtgtcccaccggacgtgcagcaggggcccagctgctcctccagtcctgggaagcagctcctccaccctcccctggacaagaggaacaatgtgtggcaaacgggctgacaagggacgtccctgggtaccacagatgtgccctggttcctccgtgcccaccagcagccgggagaggcgaaggcactggcctggcctggcccctgctttgagtcttatcatttctgcatcattctgagctggaaacctccccaaaatcattcaaggacccacataaccacacaatggaagccttgcagccacctaacagcaggaaaggccatagccaggtccccccagctgcctcctgggctccgacccacccaccgtagccacagcctatttacacacgtggcgtcaaagccacggccgtcaatcactgcgtgtcgctcccagctgcagacgctggacaaaagggcgacggggtggcagcccccagcgaggacggatgggccatagggctgctctctgggcatctctgagcaagaccctccggcgccacagcagaaatggccagacgggcctgtacccaaaaagccagcggcgacagtgttggaggaaaacaggccaggagagccgtctcctccccgcggacctctgccaagacctcctctgctccgactgtggcagcggctgctccctccgcgcccaccctcgtcagggcaccctcgcctggccccactccccaccggagcctgggaagctggggtctcccagagccaagcctgacccctgggagggggcgtcccgggcagagcctgggcctggtgtggccgcgaggccctgctctccgcggggtgggaactggatggcggcaggctgtgggggaggaagacacacgtgcagtgaaggagactgtgggctccaagacttgtcacctccctgtccacggccccgccctggccacatgcacggattcctgaacccctgagaacctccttctagaactctgcgtgaaaggcgcgaggcagtgtggaggggcaaagggggaccctctgccccgcgaagtggccccttctcttcccccgaggcccctctcctcctcctcctcctcctccaaaggagaaattaattcatgaaaaataatactccagtcagcatcgggtgacccaggaaaccctgcgtcagctacagcatcagcgcccagcccagcctgagtgtgagcccctccccggccagccccagcccaagccagcggacccgcccgccagcacccggtgtggaggagagaccggggtctgccctctgcacccgagcggacagcgagcaggtccccgctctacaggaaggggagcagggaggtcaggggcagctccttctccccgagcagcgtgtcccgcttgaggctgctgcccttgttcaccaccttgatcctgagggccagtttccggacgctggcgggccccaggccgtcgaagaagaaatcctcgttgaagacggggcggcggctgttcttcacgatggtgctgcgctgcttctgcagcttgcccggcaccaggcacaggcccacgcagcagttgatgctgcgggcgtcgcacaggcggtcgtagaggccctcggcggccagcaggtgcacccgcaggcgggcctggccggcctcgtactcggccagcagccgcacgctgccccgagggcccacgtggaccgtgtgctccccacgcgcctggcccgactcggggccaggttccgggggtgcccggcgggtcaggcggcgccggctcccggggctggcgtccggggtgctgtcgtccgcagacagggagccgtggcggcccacggagtgccggagctggctcaccttggcctggctgtcctgggcgaaacctttgagcagagacacggagcgggacagcagaggggacccgaagggggaggactcggccgaggaccctgtgtcgctctccccgccactgaagtagcggccggggctcatgagggccccgccagcctccctggggcccccatcacccccgttggccttggcagctgcccggcggcgcccggcccctggggagcccacctgggccagagccccgtgctcactgtggaacagagactccttgcgcctcgtgtgggggctctcagccagcatggcgaagccgtaggacgtctgggccttgggcaccgagggcagggacatggcaccctgggcctgggggtcggcgtcagtggcctcctcggacagccagtcctcggcactctcgatctggatcacgtgccgggtggctgccttcagcaggctcttgctctcggctgccagcttggcaggcagccgggggctccgtggggtctggcggggggccgcagaggccaggttctgttccgacgtggaggggcccagcgcggcctgtccctcgccctccgcggggcccgagggcagcttgggggggatgaaaaagtcggggatcttgtcgggcgtcaacacattgctgtacaggggccccttggaggccttgtcccccgcctcactccccacgccccgggcagcaccgttttccccagacccccgaagccgctccaagaaccacatgttggtttttctcatgggggcggcaggcaagaggcccggacaggggctgcagcgtctgggaagagaagcaggggtcaggagcagtggggggcggctggcagagggccctgggcacctgctccctgtggggcctcccggcagggccctgccggcggggtgggggtggaggggtcccctgggggcgtcccgcccaggcgcggcggcccaggacaggagtgaggcgggttccccccacctttttccggagagatcccgcttaacttcccagcaccaagcccaggggcgtgggggccgcgctctgactctccggggagctcccagaggagactggcccctcgcccgcccccactctggttttgagcatctcagcgctcattccaaagggttccgcgctcagtcccaggggaagacacggatgtgggtggacccccggggtgtcccagctccgcccccccggctcccacccacctgtggctcctccctggaccggagggccaggcgttcggggtgggggaagggaggggcggtaggtctggggccgagagagcagcgagtcgactccccggtgtccccccgcccccagccctccccgactccgcttggggtggggggtggggtcccggcggtccccgcagaccgggcggggtccccggacttacctgcccggggtgatggcccgaggccggaggtctgttcgcagacacgcaggggtctcggcgcgcaggctcccggggctggcgcgggggacgcggccggagcttcgatgcgggcggcggcggcggcggcagcgcagtcggactcattcacccgcggcgggaaaccgcccagccccgccgccgccgccgccgtattcctccgagtacggccgcccgcgcccgcgcccgcgcccccgcccccgcgggaagggggtggggccgtctccccgcagcccccggaggctggtggcagggaggagcctcgccagggcccgggggctgactgggggccggtgggagacaagcaggtggtcacggttggctgacggccacccccggcgctcacgcccgcagattccgggaagtcggactcccaagcccctgcctccgtataccggaagagggtcccagaccccctactcgctgccggcgaggagctttcccgactaacgacgacgaattaaatgacggcaacagtaataaatgcagctgggtttatgatggagcgtttcctccctgccagcctcccagcgtcctggcgggtctctgactctcacacaacccagtacgcaggtcctactgcaattctcaatctgtagatgaggaaggtggggggtttccttccagaaacaaggaccgaacagctaggacagcaggtcttactaaatgggcaacctctcagcagccctacaagaagcctggaaggggggggctccttcatttcatggacaaacgtttcctgagcacccgcttgatgctggacagtgacctggccaccggggacacagctgggacggagggaggtggccccagccctggtgatgcaggggcaggatgcccacagagcgtacaggtgcagcttagaactgcaggggtggtgacgcccggaacaggaatacagcaggaaagcgtgagggtcggggcgaagagagaaggcacatgcgtgtgattcacggatggagaaacccatagggggcaagaccaggtccaaacccaggcttcctggcagttcctgagaccacagggtccccccctcctgaggccccgacccccctcctgccagctgcttcgtgatctgccagccccggccttcactgcttccttctctccctccctccctgccctccccgcctcagtttcctcttctggaaccgagctgagcagttcccagcctcctcgtgcttggagccagcaagataacatatccccaggaccaacccggagccggcggacgcctggcgctttattgaattattgattgtccaggagcctcctgcattctgggaatgtccccaagtctggatgtggcccaagctgggaggagcggctgctgccacagtggtagaagaggggtccaggagggcgagagagctgggctgaggcctccccactctccacgtacccttgcaataaggggttagagtcctgccgtccagaggggaaagtgaaacccggaggagctgtgaccccatctaagctttgctcacccagcaaacgttgatgagccctcatttttgtgctggggcaaccgcgacgcagccccgaagtctgacaaggaggcagacaccgaggaattctccccttcaccgccgccgcctccaggaagcctgggcaggccccaccacagactagcagggcccccgaaccccagctccagctgccatgcagaatacccttgggctgctgtccaccacccctgctgggcctgaggcgggaggagggtcctgggggtctgtccactgcccctgctgggcccggatcctggggatctgtccaccgcccctgctgggcacggatcctgggggtctgtccaccgtcactgctgggcccggatcctgggggtctgtccaccgcccctgctgggcccggatcctgggggtctgtccaccgcccctgctgggcccggatcctgggggtctgtccaccgcccctgctgggcccggatcctgggggtctgtccaccgcccctgctgggcccggatcctgggggtctgtccaccgcccctgctgggcccggatcctgggggtctgtccaccgcccctgctgggcacggatcctgggggtctgtccaccgcccctgctgggcccggatcctgggggtctgtccaccgcccctgctgggcccggatcctgggggtctgtccaccgcccctgctgggcccggatcctgggggtctgtccaccgtctctgctgggcccggatcctgggggtctgtccaccgcccctgctgggcccggatcctgggggtctgtccaccgtctctgctgggcccggatcctgggggtctgtccaccgtctctgctgggcccgagccgggaggagggtcctggaggtcctgtccctgtagtggccccaaggcacaggccagccatgtctccagtaaacatttgccaaacaaatgggtgaatagcatcgccacgatggccccgaaacagtgctctttcagcaggcccgaggagagggggcctcaggggccacagagccaccctcctccattgcagacaaggacagcagggcctggggagggaagcggacagcttgggtcctaggaaggggcagtgacgggtctcctgacatcaggccagccccaggtattgggggttcgctctccggcacccctgcccagcccaggtgggggcagagcctctcctgccagctgggttgggggatgaggcactgagtttacactatgcctgtctccatgctaggacacaaatccagagctggtcaatcagggcttgaatcctggtgccaacccttcccactgtgtgacgctggacaagcatccagacctctgtctcttcagcagcccagggcaccacggctctcgagggagggctcaacagatcactatgtgcaaagtgcctacagcaccccaccatgtgtgcgaggcaggcgtcagtcgccctctccctcagacgcttctgcaggtcaggaagggtctcaaccaggggggagctggcccagacctcaaagtgcaccccagagccctgaccccaccacagcctggcttggccagaagccccaccccatccccacatcctatcacatttgggggctggggaaacataggcctgaaaagtacctgggatgggtcctaacacctgccctgtggacggacgcagaccccaccctgggtggggcaggggcagggagcccggggccttctggctgcttagctctgcaccatcggtaagtaaacaggagcctctcctggtcaacagaaccttctgcttccctctgcagcagcctcgctgcagccctccaggatgggagaccaggatgctgcagattcgggctcaagctggaggaggggcccaggtggtatcgaccagcccctctccgccctgagtcgtggcgcctcatgctgggaggctttggccctccatccccccaggtgggggccccaccagggacccggggcttcccagagccaggcctgaatccaaggctgccccacagtggcctccaggataacaggcttggaggacctacagggaggtggtttaaaaaggggagggctgcaatccgagctccaatgctgaggaggccactgggtagctgtgcagcttgaagacttaccctgggagcctcaggaaagggaggggacggcgtaacaataaaacaatcccaggagcaggactgtctgcgagctcccaggagggacctgactgattcgtgcatcacgggttagcccagtgggagggccctggagggccaccatcgccagtttccagagagggacactgaggcaccggggagtagcccgattcctcagggagcacatggaaccggctgacctccaggcctgccgcaggcggggtgctcagttgatactagctgattcccggggcatcctgcccctccacggcaccagctgatacccaggtcatcctggccatctatggcaccagctgatacccggggtgtcctggcccttccatggcaccagctgatacccaggacatcctggccatctatgccaccagctgatacccggggcatcctggtcatctatgccaccagctgatacctggggcatcctggccctctatggcaccagctgattcccggggcgtcctggcccctccacggcaccagccgattcccggggcgtcctggtccctccacggcaccagctgattcccggggatcctggccctctatggcaccagctgattcccggggcatcctggcccctccacggcaccagctgattcccggggatcctggccctctatggcaccggctgattcccggggcatcctggcccctccacggcaccagctgattcccggggatcctggccctctatggcaccggctgattcccggggcatcctggcccctccacggcaccagctgattcccggggcatcctggcccctccatggcactagctgattcctggggcatcctggcccctccacagcaagtcctcctgtctcctcgtgcaggggatcgagtgcgattcagggaagaaaacgactcttccaggctgcgcagcatttagaggttgaatgtgacccagggttctcctgcctcccactccaggctcaggctcccgaggagtggattattgacttaattattccaattattggaagtacaaaggtaggaaaggggaggagacaggtgtagggaccgagctggagccaggcgtctggggacccaggctcttccaacccagagaacgggattgggagatgggggccctccaaaaccagcttcaccacctcccagtgggatggtctcgggggtcacctcgcctctccgagcctccgtttcctcatctgtaaagcagggagagtttcagccccccgagttcatgatactcttggctcatgtcccagcaggcgccagtttctatttacacagggacttggaagaggacagacagaggtggagtgtggatgggcaacttgggcccagggcccagggctatgaatgaatgaatgaagtgcatttagacccctctatcctatgcatcttgggaatctgacactccctactccccagcactcctctggtccagcgcctcctccttgccctccccgcaattcccaacagtttacttcccacagggaatgttatcacccctgtgctcaagacccctggcagctcttcctggcaccaggcctcccccaagctctgtgtcctcaccccgcttctgacctcacctcggccacactggccacccttctgctccctgaacgtgctggctgaacacaccacagggcctttgcacacgccatctcctctgcccacgccatctcctctgcccagagctctactttcttcacctggatttcctgggatttctaagctccatgacgcactcttttccacagttgtttgttttgagatggagtctcgctctgtcctccaagctggagtgcagtggtgcgatctcagctcactgtaacctccgcctcccgggttcaagcgattttcctgcctcagcctcccgagtagctgggactataggcgtgcaccaccacgcccagctaatttttgtatttccagcagacatggggttttgacatg[139 bp omitted]gtcacttggccattaactccacaagggcagatctgttttggtcattactgcatcttgtttgcccaccagagctcctgacagataaaagatactcaagcaggtaaaagatactcaatgcaagcatgctgaaagacggtgggtgggtggatggatggagcagtgaagggaatgaaaatgaacaggcgatggatgagcgatagacaggtggatgcatggatgatgaatggatggacagatggaaaatggatagatggaataatgatggaggcttaggccgatggatgggggaccaggtgggtgaatggatagatggatggctgggttactgatgggtgtagatggggcgatgaatgggtgactggatggatggatgactgaaggatgtgtacatgtggagatggatggatggctggatatgcagatggatggttggatggatgagtgggttactgatggatgtgtagatgggggatgggtaggtggattacttgatgtgtaaatgggatggatgtatggttggatgtgtagatggatggatgggtggattactgatggatgtgtagataggggatggatgagtaggttactgatggatttatagatggatgatgcatgatggatggatggatgatggatggatggttactgatagatttatagatggatgatgtatgatgggtggatggatggatgagtgggttactgatggatgtgtagatgggggatggatgaatgggttactgatggatttatagatggatgatgtatgatggatggatgggtgaatggatgatggatggatggatgatgtatgatggatggatgggtgaatggatgatggatggatgggtgaatggatgatggatgggtgggtgaatgggttactgataggtttatagatggatgatggatgatgggtgaatgggttactgacagacatgtagacgggaggatggatgggtggctctgcctccacatctcggaaataaaagacgtgtcattgaagccccttttgggtttgcctttggaaggctccagtcctagttaaggacaaaccagagtggctttttctccccacacacacccttactagacctgtcccccagggcagggggtagggcctgctgtctgcagagaaagcagccagagatcctcggcccttgacagacatggccctgcagggatgtggagaggctgggaacctctctcctgggaagatgctgtgtttgtgggaacctctctcctgggaagatgctgtgtttgtgggaacctctctcctgggaagatgctgtgtttgtgggaggagctggggggtctcttggagccagaagctcagatgtaacatgacggcaggtctaaggaatggagctggggtgcttgagcacgatgctgggcgtcggggaagagcaggggcatcgagggggatgtcctggagagaagctaggacaacaggaaagcccggcccatctagggccatgctgggggcatcttggagaagaaaacaaccagctcttgtctgatgtcctgggctgtcttgaaaggcagaggtttggcattcgggtgataaactagggtgtctccaaggaggtgagagaagtgtttagtggagaagttgaactgtgttttatcctggataaaacagaggtaaccagagagatgcgggggctgctgggcagaggggtcaccccacaatctgccaggttcgggcacacgcacagccccgccttccttctctccaagtccaggcccttagggaggccaaatgtggtccctctgagccccctcatcagctctccacctgggagactcgtcccagccccagccccgcgagggcccccagatatgcaggtgggcttgtgctcttgtggccattcccaggtttaattacaaaccgatccgaacatcccatctgggtcgacagctgggagggcaggactggggggaagctgctgggcgcagcccaggccaggcaaccacgtccttcccctgctcccaggtggagtaggggcctcacgactgcctcgatatccactgtcttggagcagcctggctaccccgagatcccaggtgacctcaaggctgcctgcacttcagcgccagcatgtatcctggcctgagaaccccaaagcaccttaagcgtcccccctcaaagacaactgtgcacccagtcctcaggtgggaagaggaagcccagccaggcccggaatccgcctcctccccagggtcctgggagccctgactctccggggcgttagaccgaaccagccaggcgagagggggacccaagggccagggctccgaggcagcggctgcttctggatatattttctttaaaggcgaaatggttccgtctttggtatgaacaccctcactccaggcaaaggagggggtgggcaggggccccggcaggaggaggctctgcccagcccggggccagctggaggaaggaccatgccagaggctcatgcggaggaaggagaggcagcggtggttcggcctgaccaggatccaggaggagggctgagagccccaaggccatgacaggcaggagccggggctgagaacaggcaggagccagggctgagaacggtcacctgcgggcagaaagagaaggcgaggtcagggctgagacggtggccgcagacctgggctccggtgtgagccacatgctcttctgccttggcatcatctctgcaagtgccacacctcaggtccagcccagagctcctcaggtcgcatggctggggctccggtgcaggtgtcctgagtccttgctgtggacctagggcagtgccctaacctctctgctgtctcctcgcgtgcaagcaagaatgccgatcccagtgcctgtctcagaaccgaagggttgagcacattcctgggacagggcaacggcctcctgagcaggaatcattactgccttccaggttatttctggggtcaccaacgcctttccgaggggacgcaggcagggaccggtgcgaacggaacacaggagcccgtgtgccacaggccgcaggcagtttcaggtgctttacaggagcccctgccatacccggagccccctctgcctgcagcccgaggcctggctgggggctgggtggaggccgcggccgcataggggaggggccgcccaggagagaggaggctggaaggagaccgttgtcatggggacaggagagcggcctgacctggcccagaagcgcagcccttgggaaattccacagccccctccccctgccggccctccctcctccccggctgctctctcagccttcactccctccagccccacagctgcaccctctcctgccccaacctcaccccagaggagagaccatgagatcacccagacctgcctgtccctcctccgtccacaccctaccatgggtccccccgggccccgcaccaaaagtggaggcctggggctccttggcccggcctgaggtatggtcttctcactgcctgggctcacacgccagcccctgcctgtcccagcccaccgtcctctccggcagtgcccacccctcctctgggaaggaggcctggacacccagcacgccgcaggggtccacaaagaccaggtgacgcccaccacagccgaccgcagtgtcacggtcatggctgcacgctgccaccctcgggcacatatccacccacgggcagtgacgcgtgtccacacacaacctgcacacaaaggctcacggcggccaaaaggcggaagcagccccagcgtccatcagcggatgaacacacaaaacgtggtcccctcacacagcgggacattatccagccgagaacaggagccaggctctggcccgggccacggcgcaatgcccctggaggacgtcacgctcagtgagagacgccagacacagaaggacacacagcgtggaatcccattgctatgaaatgtccaggacaggcccatccacagagacaggaggcggatgtgtggggttggagctggggaggggacagggagtgacggctggtggggacagggcttctttcggggctgacagaatgttctggaattcgacagagatggttgcacggctcggatgctgaacacccctgagtcgtgccctctagagggaaaggcacggcacgtgaaccgggtctcaattttcaaatcagaaaagaatctggcaaaggaggcaaggccagcgacccacggcggcagccacacacctggctcagggctcccgtgagaccacgccacgcaggtgcagctcactctcggcggccacgatgggctgcccgttctgcaggtggtggtcgatcaggtggctgatgctctcaaacagcacgtccttcgtccgtacctgcgggacagagacctcggcatcagctcccgggagcccgcctggacccgtggagtaggatattggcgttctggggtcctgccggggagcccctagggtgcctgcatggacgaggggccggaccagggaattccgggacaccagccaaaggatcggcctcagaattccagaaccacccatgggcacgggctctgaaacccccagggttctggggccacgcttcctgtcgggagctgaaaggtgaccgcgggaagatgcggccaggtcccagccctcagagcctgtgaacgtgacctcatttggaaaaaggtcttggtagataaacaggtcaagggtcctgggacgaatgcatccaggatgagccaggggggccctaagtccactagctgctttcctgacaggaaaaggaaaacatgcagatgggcaggagagagcagagattggagccgtgtgtccacgaggctggcagcacccgggagcccggccaccagcgggcgccgggaggggcctgggaccgaggctccctcagagcctccggaaggaaccagccccggccacaccttgagttcggacttctggcctccagagctgtgagaatgaacctctgctgctttaagccacttcgtgtgtggtcatttggtttgcagctccaggaaacacacccctgaaatcctggagacacaggcctgaaaatctgaatcgccaaatcaaaatccagctgcatttttgaacgagaccctcttagcgctaccgagcgctggaactggatgcaaaaccaagagaccctgtgtcccacggctgccgagcagctcctgagtgaggctgggggccctgtgcacatttcacgtgggaagcaggggtaaatccacggctgccgagcagttcccgggtgaggctgggggccctgtgcacacttcacgtgcggaacagggacaaatacacattcctaggcctgtggcacaatcacgtccttctgtgtggcactgggaatgggagctgggaatctgccttttaacaaggtactggtagacgttctgaagcttctccaggtgtagtggctgccggtctgaccccagcgatccatttaacagagaaaatctggcctgggaaagaactgaggtatcacacaccaggctagaggctaggcagtggcggggacaccagaaacagtctgagggggctcaggaactgggagaacaggcagctctcgcccaagccctgccccctccagctctgtcccaggccggggtgcacaagagcccccacctgcccgcccgccgccgtgtgcttcacgcagagaccaggctcacaccagcccaagagccacctgaggattcagctggatggctgaaaacgcctcctacgctctgagaggcctccgaaccctctagcacctcctcacctgggaaataacctgtgcagccctcggacgctcaaaacgcttcataaaccctagaactccttgtaaattggaaaatgctttgtaaacctttaaatgctttagaagctggagattactaaatctcattggcccagagcaactgtaagatgcgccatgattttaggtaccaggaggagagagaagagaaaaacctccctgtaaaataatgatgcacttcaaatatgcaattgatggtttttaaacaaaatccagactctagagatatcaaa[139 bp omitted]tggtgataccccgtctctactaaaaatacaaaaattagtcaggcgtggtggtgggcgcctgtagtctcagctactcgggaggctgaggcaggagaatcgcttgaacccgggaagtggaggttacagtgagctgagattgcgccactgcactccagcctgggtgacagagcgagactccatcaagaaagaaagaaaggaaaggaagaaaaga[161 bp omitted]aaatatgaaaaattagccgggcgtggtggtgggaacctgtaatcctaggtactggggaagctgaggcgggagaatcgcttgaacgcgggaggcggagcttgcagtgagccgagattgcgccattgcattccagccggggcaacagtgcgagactccatcaaaaaaaaaaaaaaaaaaagaaaagaaaagaaaaagagagaaaaaaaggaaaggagggagggagagagggaggaagaaggaattgaagcaattcagtaacttgatcccaaaattccttgtaaattgagacatactttgtacaccctcaaataaattagaacctgaaaataccatatttatccctcagatacatcaccatttgtaaggtgcataagtcatgataaatggggggggagagcatcttatgatggatgaaatcataagattgagattacaactgggaggccaaggcaggaggatcacttgaggccaggagctggggaccagcctgggcaacgtggcaaggccccatctctacaaaacttagctggggacggtggctcacacctgtagtcccagctactcaggaggctgagacaggaggaccacttgagcccaggagttcgaggctgcagagagctacgactgtgccactgcagtccagcccgggtgacagagccagactctgtctcaaaaataaactggaaaatactttgtaattctacagtagctggtcaaaggcaacatctggaacaatctggaaaaacttcataaacatggaaagctcctgcatgccccgagaccctcgagacccttgagaccctcccacctgtgcccagcgaagcccctggatgccccgagaccctcccacctgtgcccagcgaagcccctggatgccccgagaccctcccacctgtgcacagcttaccacgccctcggggtccacgagcagcaggtgcttgggctgcccggcgtgcatgccggtgaggacatactgcccggggttggtgacgctgtctcgcacaaggaagtccccgtcagctcgaagcatcctctctgccgcccggcggctcatccggccgtggtaccagggctcctgacgcagctgttcctccgtgggggccacaggggcccggcgggtaggggggctgggccactggtcctccaagggaagaggggctgctgtcacgcctgccgccactgagcactcatgcaacttcagggcatcctcaaagggtcctgcaggccagggacaggagtgctgggcaggcagggggcaagcagctactcctgccgggaccagagctgggagaaacgggttccccggggagtccctcgtgcacccgtcggcctgcgctgaccgagcgcccacagcgtatcagactcgcactctgcccagccccgtgcgtgcggtgggctcacatgtgtagcaacctggactccccaggttgggttttctaggcacgtactaagcatgtacaaagggtaacagcagctctttctttcagaggttaactcctatttctttttcctgccttgtcaggtgggcttccttcccaaagcgtacgcctctcgtttccttgtctggtcttactgcattggccgcggggcctccaatgtgccctaaatactcaagacgacagccggcacccctctcttgcccctagcgttaaaatgttctgccctgggttttctaacggcttccaacaatgccaacatccgacaggccactctaaggctctcctctgagtgtcagtcccctcattgtcaaacaggggtgggcgtgtccccaggcagaaagcagcatggttcagaccctgcagtgctggagccccagccctgacggagatgcatctacccgtggctggggcggccttgaattcctccagctcctggtcctggggggtcctcccgccctgaccctcactccctggtctcccgcccctccagctcctggtcctggggggtcctcccgccctgaccctcactccctggtctcccgcccctccagctcctggtcctggggggtcctcccgccctgaccctcactccctggtctccggcccctccagctcctggtcctggggggtcctcccgccctgaccctcactccctggtctcccgcccctccagctcctggtcctggggggtcctcccgccctgaccctcactccctggtctcccgcccctccagctcctggtcctggggggtcctcccgccctgaccctcactccctggtctcccgcccctccagctcctggtcctggggggtcctcccgccctgaccctcgctccctggtctcccgcccctccagctcctggtcctggggggtcctccccccctgaccctcactccctggtctcccgcccctccagctcctggtcctggggggtcctcccgccctgaccctcgctccctggtctcccgcccctccagctcctggtcctggggggtcctccagccctgaccctgggggctgagccagctccaactcctagcctggccagtcagcatgttcacctccccctcccagccagcgactggtttggggacgagcacgtggcgaatcagaggcagccccaggactcttcgtggaggacggacgagaagacacccttcctcaaccggggctgcctggcagtctggtcaccctgagggacagcctgcctcagagggaagctcagagccccaagcccctcctttcccatctgagggctgctgtgaggagccaagaggagcaagctcttcacgtagtgcttggtacacagcaggcgcccactaggtgctagatggtgtcattattgtgaagctgaggagaagctgctttgtcaggtggtggaggaaagggagaaatttgcagttagcttgggaggcatcctgagctcaggcaaggaccctacccggcagctcagagccaacacctctccgtgctggagaagggcagagtcgaggctgcaggaaatcaggagagaactctggacacctcagccaaggaaggacaagcctcctccgcccggctgggggctccctcgggctgggtcatccacggggaaggaaggaacgggctcaccgtcagactagccactttgtccagaggtggactaagcctccctcattggactgggcgttccttcaagcaggaagctgtgcctcccccatcaggccgggatttccgtaggaagaatcctcagaccccggagtcacgtgaagagaaaactcatcagactagggagacccagagtcagcgtgcaagaccagcgggccaggcagtcgtcccagcaggccgggattcccacagagaaaagacgaggcctcccctctcagactaaggagtcccatggggcgagggtctggcttcccctgttgactggagggcctcacagacggggccgcagcctcccaccacactgaccattctttcaaggaatgacgaacctcctcccttcagaccgggggttccgacagaggcaggtgggttacccccgagagagtggagcttctcacagagcgggggccagcggcattcccaaccagactgggggttcagcagggaggccccgggagatggggtcctgtaggaggggctgggcctcacccattacactgctcggccgcattcgctagagagaatgggcctcccctgtcagactggccccttttaaggcagagtccaggacacccccatcagacaaggcctccgacaggagacagactgggcttccccgtcccacccgtcgacttgaaggatctcacggggagaagggagcctcccccatcagaccagggaatcccgtagggagtgggggtggggttgtgcctcccccatcagacaacacggccacacgcgatgacggccgccccccaggctgccacatacgcatgtcaaacagatcctttttggggctgtcctccggctcgggggcgtccagaccctgggtgttgacatacaggtgctcctcgtggtccggggggccccgggcgtccgcctgcacgtagccgtcccccggtggagctggggagtgtaaagaggggcagggggtcagctgggagccaggcgaggggctcgcagggagcaaggcggggtcccacgaggagctcccccggccaccacctgtgctgctggctgcagggcggatgctgctctggtctccctgtggtaacccgcccgtctgcaggtgccacagggagcatcttacagcagcaaagccccgtcggggctccaaccagggacaagagtggggcagcgtgcggctggggctgtgggcaccagacgtccacgcccagggagaaggcagccgctgctccaccccaccccgccctggccctccccggcccagggtccagagcttcccagtgcgtgtatgttcagtctccacatttaaaaataatcacagtaactctgcttccctgtaattatgctatcaacatgacgcacggagggtcacttattctgactcagttctatttcaggattttccttcctttct[142 bp omitted]tgaaaccccgtctctactaaaaatgcaaaaattagctaggcgtggtggtgggcgcctgcaatcccagctatttgggaggctgaggcatgagaatcacttgaattcaggacgcacagattgcagtgagctgagattgtgccattgcagtccagcctgggcaacagaatgagactcagtctccaaaaaaaaaaaaaaaaaactatccacatggttcaaaccggaacagcatcgcaggtaaccttggggcatctccctcgggagctgcctggaccccatgtgtattctgccaggtcctgaccagactgcctctgccttggaacagggtctggctgtgaatccacatgaacgtgaggctgcactagcccttgctgggtgacgagggcagaggggcttctcccccgccttcccagtctaccaagaggggcacagattctctcagcttcttagggtcaggatgggtgagagggaagaaacgcagttccaagagtccggggagggaggacgacagtgcgagaggcagagtccggggagggaggacgacaccgagaggggcagagtccggggagggaggacgacaccgagaggggcagagtccggggagggaggacgacaccgagagaggcagagtccggggagggaggacgacagcacgagaggcagagtccggggagggaggacgacaccgagagaggcagagtccggggagggaggacgacaccgagaggggcagagtccggggagggaggacgacaccgagaggggcagagtccggggagggaggacgacaccgagaggggcagagtccggggagggaggacgacaccgagaggggcagagtccggggagggaggacgacaccgagaggggcagagtccggggagggaggacgacaccgagaggggcagagtccggggagggaggacgacaccgagaggggcagagtccggggagggaggacgacaccgagaggggcagagtccggggagggaggacgacagtgcgaggggcagagtccggggagggaggacgacagtgcgagacgcaggcgggtggaggaatccctggaccctggacccgcgctatgggcacatttgtaggagttcttggccagagaatcgggaagggcatgagtgcaagtgagaacagcccgggtgtgggcacaggggcagggaacgctggcgagcccccggtccggggtgagcagccagcatcccagaggaacgtgcgccaggaccagagcacagctgggcaccgggtgggcactcgatggctcgagtttctctgaccagctcgagggctctgacgcttggcagcgaaatgccagattgtttgggaagatctaaaaaaagctcaacacagatgttagcaaggctgttaggaaacaggcagccgcaggcggggctggtgggcgagccgactgcacagccgcctccagggtggactggcaccgccggtaacgtgattaaggccggcgctccgtgacccggcagttcccggctcagcatgcactggagagaagggctcgtgggaacgaggggcgcctgccgcggagctacctgagggagcgggaaggatcctcaatgcccatcaggaatggcttgggtaagggggaattgcacacggcacagggaaggggaattgcacacggcacagggaaggggaattgcgcacggcacagggaaggggaattgcgcacggcacagggaaggggaattgcgcacggcacagggaagggggaactgcacacggcgcagggaaggggaattgcgcacggcacaggtaaggggacaggggacggcgcacagcacacggaagggggcggcacagggaagggggaactgcacacggcgcagggaaggggaattgcgcacggcacagggaagggggaactgcacacggcgcagggaaggggaattgcgcacggcacaggtaaggggacaggggacggcgcacagcacacggaagggggcggcacagggaagggggaactgcacacggcacagggaagggggaactgcacacggcacagagaagggggaactgcacacggcgcagggaagggggaactgcacacggcacaggaaaagggaggccacatggcacaggggaggggacggcacagggaagagaaattgcaccccgcacagggaagggaggatctcttgagcccagggctttgagatcagcctgggaaacagtgagacctcacctccacacaatttaaaaatgtgctgggtgcagtgacgcacgcctgtggttccagctactctggagtgttaggagtgaggactgcttgagcctgagaggtggaggcttccgtgagccatgatcacaccactgccctccaacctgggcgacaaagcaagacgtctcaaaaacaaaaagccaaagctcgaagtgcccggtgggaatgtcggttgagcgggcaattactgattcctactgaaatggcccgagtgcccctccctgggacgcgtttgttgagtcctggcacacaggcggaccgtttaaggtcaccacactgctgtctgtcatggcaaaggcctgcaatcaacgcagatgtccaggaccagggcgtgagtggaataaatgatgtaaccatgaggaagtctggcgtgcacagtgtgggaagaacccctgatgtttgccccatggacacagcaaggtggaagatggatgggtagcacaccctatctgcaaaaacaagggctatgacgcacgtttgaactggcttgaatatccgttgaaaagctaggaaaataactcaggagccactgacagctaacagtggctgcctgatcagggaggcaaagaaaacagatgcagacaggtatgaaagagattgctcattgaacggctttttaaactccatgatgttttgaaccatgtggacgaatgcagtacctatatccaacatgcagagaaacctaatactgtgtggatgacacagtatctacacccaacgtgcacagaaacctaatactgtgtggatgacgcagtacctatacccaacatgcacagaaacctcataccgtgtggatgacgcagtacctatatcccaacatgcacggaaacctcataccgtgtggatgacgcagtacctatacccaacgtgcacggaaacctaacaccgtgtggatgacgcagtacctatatccaacatgcaaagaaacctaataccgtgtggatgacgcagtacctatatcccaacatgcacagaaacctcataccgtgtggatgatgcggtacctatacccaacgtgcacggaaacctaacactgtgtggatgatgcagtacctatatccaacatgcacagaaacctaacaccgtgtggatgacgcagtacctatatccaacatgcagagaaacctaataccgtgtggatgacacagtacctatacccaacatgcacggaaacctcataccgtgtggatgacgcagtacctatacccaacatgcacggaaacctaacaccgtgtggatgacgcagtacctatacccaacacgcacggaaacctaacaccgtgtggatgacgcagtacctatatccaacatgcagagaaacctaataccgtgtggatgacacagtatctacacccaacgtgcacagaaacctaataccgtgtggatgacgcagtacctatacccaacgtgcacggaaacctaacaccgtgtggatgacgcagtacctatatccaacgtgcacagaaacctaacaccgtgtggatgacgcagtacctatacccaacatgcagagaaacctaataccgtgtggatgacacagtacctatacccaacatgcacggaaatctcataccgtgtggatgacgcagtacctatacccaacatgcacggaaacctaacaccgtgtggatgacgcagtacctatacccaacatgctcggaaacctaacaccgtgtggatgacgcagtacctatacccaacatgcacggaaacctcataccgtgtggatgacacagtacctatacccaacacgcacagaaacctaacaccgtgtggatgacgcagtacctatatccaacgtgcagagaaacctaataccgtgtggatgacacagtatctacacccaacgtgcacagaaacctaataccatgtggatgacgcagtacctatacccaacatgcacggaaacctaacaccgtgtggatgacgcagtacctataccccaacgtgcacggaaacctaataccgtgtggatgacgcagtacctatatcccaacgtgcacggaaacctaataccgtgtggatgacgcagtacctatatcccaacatgcacggaaacctgataccgtgtggatgacgcagtacctataccccaacgtgcacagaaacctaataccgtgtggatgacgcagtatgtatatccaacgtgcacggaaacctaataccgtgtggatgacgcagtacctataccccaacgtgcacagaaacctaataccgtgtggatgacgcggcacctatatctcaacatgcacagagacctaataccgtgtggaagacgcagtacctatatccaacatgcatggacacctaataccatgtggatgacacagtacctatacccaacatgcacggaaacctaataccgtgtggataatgtagtacttatacccaacatgcaaggaatctagtgtgtgcaggaaaaacagacactgatgatgaaaatctcagcagagtgttaggagcaagacgatctcatagattaatgtgaaataagcagagaggagaaagactgagggggagccagcacaggacagggctgaggagccccagaatcctcgtgggtaccccttgcagccccagcccatcctacctgtaccggtggaccccacgtcccatggcaggctgcaggcatctcttagagaaggagatgggccctggaaacagagcagtgagaggttccccggtgtgtgcaagcccctcttcctggctctggacccccagtctccccgcccggccctcttagatggctggagacttaggggtggggagcacagccctggccctcccattgctctctcactctgtaactaggccccctgggtctgccgcccacctctgccgtggccttccccgccttctctccacctcggaaggtggtcagcacatcctgccaccttgcaatggctgttccccctgcctggataaccttccccgctctgctctcccaggcagctcctattcaccagtcagggctctacccaaatgccgcttcctcagggaaggcctccggaccgccctacagagtgtatgtccccatggacatcctcactgcctctctggtggacttaccaaggccctgattaaatcattgccgtatttatttagtgtctgagggtagaagtcatgtctgaaatgccacctcgtctaatgtgtccagaggaggccgggcagatagatggcgcttcatcgtgagtgagatcgtgagtgagagttagaggaggccgggcagatagatggcgcttcatcgtgagtgagatcgtgagtgagagatagaggaggccaggcagatagatggcacttcatcgtgagtgagatcgtgagtgagagttagaggaggccgggcagatggcgcttcatcgtgagtgagatcgtgagtgagagatagaggaggccgggcagatggcgcttcatcgtgagtgagatcgtgagtgagagatagaggaggccgggcagatggcgcttcatcgtgagtgagatcgtgagtgagagatagaggaggccgggcagatagatggcgcttcatcgtgagtgagatcgtgagtgagagatagaggaggcggggcagatagatggcgcttcatcgtgagtgagatcgtgagtgagagatagaggaggccgggcagatagatagcgcttcatcgtgagtgagatcgtgagtgagagttagaggaggccgggcagatagatggcgcttcatcgtgagtgagatcgtgagtgagagttagaggaggccgggcagatagatggcgcttcatcgtgagtgagatcgtgagtgagagttagaggaggccgggcagatggcgcttcatcgtgagtgagatcgtgagtgagagatagaggaggccaggcagatagatggcgcttcatcgtgagtgagatcgtgagtgagagatagaggaggcggggcagatagatggcgcttcatcgtgagtgagatcgtgagtgagagatagaggaggccgggcagatagatggcgcttcatcgtgagtgagatcgtgagtgagagatagaggaggccgggcagatagatggcgcttcatcgtgagtgagatcgtgagtgagagatagaggaggccgggcagatacatggcgcttcatcgtgagtgagatcgtgagtgagagttagaggaggccgggcagatagatggcgcttcatcgtgagtgagatcgtgagtgagagttagaggaggccgggcagatagatggcgcttcatcgtgagtgagatcgtgagtgagagatagaggaggcggggcagatagatggcgcttcatcgtgagtgagatcgtgagtgagagttagaggaggccgggcagatagatggcgcttcatcgtgagtgagatcgtgagtgagagatagaggaggccgggcagatagatggcgcttcatcgtgagtgagatcgtgagtgagagatagaggaggccgggcagatagatggcgcttcatcgtgagtgagatcgtgagtgagagatagaggaggccgggcagatagatggcgcttcatcgtgagtgagatcgtgagtgagagatagaggaggccgggcagatagatggcgcttcatcgtgagtgagatcgtgagtgagagatagaggaggccgggcagatagatggcgcttcatcgtgagtgagatcgtgagtgagagatagaggaggccgggcagatagatggcgcttcatcgtgagtgagatcgtgagtgagagatagaggaggccgggcagatagatggcgcttcatcgtgagtgagatcgtgagtgagagttagaggaggccgggcagatagatggcgcttcatcgtgagtgagatcgtgagtgagagttagaggaggccgggcagatggcgcttcatcgtgagtgagatcgtgagtgagagatagaggaggccgggcagatagatggcgcttcatcgtgagtgagatcgtgagtgagagatagaggaggccaggcagatagatggcgcttcatcgtgagtgagatcgtgagtgagagatagaggaggcggggcagatagatggcgcttcatcgtgagtgagatcgtgagtgagagatagaggaggccgggcagatagatggcgcttcatcgtgagtgagatcgtgagtgagagatagaggaggcagggcagatagatggcgcttcatcgtgagtgagatcgtgagtgagagttagaggaggccgggcagatagatggcgcttcatcgtgagtgagatcgtgagtgagagatagaggaggcggggcagatagatggcgcttcatcgtgagtgagatcgtgagtgagagttagaggaggccgggcagatagatggcgcttcatcgtgagtgagatcgtgagtgagagttagaggaggccgggcagatggcgcttcatcgtgagtgagatcgtgagtgagagatagaggaggccgggcagatagatggcgcttcatcgtgagtgagatcgtgagtgagagttagaggaggccgggcagatggcgcttcatcgtgagtgagatagtgagtgagagatagaggaggccgggcagatagatggcgcttcatcgtgagtgagatagtgagtgagagatagaggaggccgggcagatagatggcgcttcatcgtgagtgagatcgtgagtgagagttagaggaggccgggcagatagatggcgcttcatcgtgagtgagatcgtgagtgagagttagaggaggccgggcagatagatggcgcttcatcgtgagtgagatcgtgagtgagagttagaggaggcggggcagatagatggcgcttcatcgtgagtgagatcgtgagtgagagatagaggaggcggggcagatagatggcgcttcatcgtgagtgagatcgtgagtgagagatagaggaggccgggcagatagatggcgcttcatcgtgagtgagatcgtgagtgagagatagaggaggccgggcagatagatggcgcttcatcgtgagtgagatcgtgagtgagagttagaggaggccgggcagatagatggcgcttcatcgtgagtgagatcgtgagtgagagttagaggaggccgggcagatggcgcttcatcgtgagtgagatagtgagtgagagatagaggaggccgggcagatacacggcgccccattgtgagcctgtgattgagtgagtgagtgagatcctgagtgagatcatgagtgagtgagatcatgagtgagatcatgagtgagtgagatcatgagtgagtgagatcgtgactgagatcatgagtctgtgagtgagatcatgagtgagtgagatcatgagatcgtgagtgagatgatgagtctgagtgagatcgtgagtctgtgagtgagatagtgagtgagactgagtgagatcatgagtctgtgagatagtgagcaagtgagtgagatcgtgagtctgtgagtgagtgaaatcatgagtgagatcgtgagcctgtgagattgtgagtgagattgtgagtctgtgagtaagtgaaatcatgagtgagtgagtgagtgagtctgagtgagagaccctcctctaggatcgaggagaacaggagcagaaagaagagctggaggtaggtccagggaaccagcagctggggcatccctgtccccatccccccgagggcagaggctgacctggtcgagggccgtgagggcgcagggctgtgtcagggccagcctggagtccactagcccgcccagcggcggctccttccccgggatgctgttgtagtaattgtgctccaaagagtcctcctcgtccccccaggccgactcctccggccctgccagcctgggggacagacaacaacggccatggcacaggcagggcccaagggggctaaagccttacggcttgagcttctgggggagcaggaaatatctgagttcgaatcccagccccccacctgtcactgagggttcctaccgggaaacgcttctagagccagtgaccaggcccactacttcctcatctataaaatggaatgttgcacacatttccgagctgtagcacaaaaggcaggtcgttggcaaacccagtctccactcctttctgcccacctccggccccgcccggcagcagagggcatgagccaagtttatacccagaaccaggacatcaccggtcagggtggcaactctctgggatcaaagcgcccccgccctctggccccgatggcactggcaggaattgatcctgcaggtgctcctcagcaagcacggccccgagagccagaggggtgcaccccacctggcccacagtcgctgctgggataaattatgaagcagcctacggaaggcagaggcagctctggaggcaggcgaggagcccgtctcagcttcggagcgtgctgagcaacgtgcatcaagcacgctgtccccgtgcacaaaggggtgagtgtgagcaggcgtgcgatgccgcctccctcgtgaccagcaggctgggagctcatgcacctgcacctgccctcccaccattggaggaagctgactttctaatgatgaatagagacttaaatagctccttctccaaggccagctggcaaaccccagcccagggccaaatccagctcaccgcctagatctgtgtggcccacgagctaagaatgggctttcaatctttaaattatcaaagttaagtgtttgagaaaacatctagagaatcatattttgcaacacgtggcattcacacttcaatgtctataaaaaacgtgttaccagcacacagacacgtccccccctttacacatgttctgcggtgagacggaggccgttttctgcccattgcgggagccggccgcgcgtctggaggagggatattggttgtagcagcagggctgacagcctcaggcacaccggggagtcagcttgcttagtcctccccaatcctggggggcaggcggggatgcgtttactcgggtgttaacagccgaggaaacaggatcctctggctgagccatattctcacgggacagggagggagggacaagggcaggacggaggctgaggcctgcaggaggtggagcaggctctgcacctgggcaggtcactgggggtgtccccagggcacgggggaggcagctctggttacctttctgggggcagcgccaccttgggcgggctgtgcaggtactgcttgaagcgcagctcgaaagcttggcccacggtgctgatgatgctctgtgccaggccctcacagcactccaggatgtggcaggctgcgggcacgttggtcatgcagcctccgagccacacggccgtgccccccagccacaggacccccaccggcctccccgggggcctcacctctctggttgatggggtccttggcgacgtaggccacgtaatccgtcatgtcctgggggcggggaggggccagctggacctgcctgggccccccaccgggattcccagctgcccaccccagcaatgcagagagatggggcagtggatgtgggcacagggtacgttaggcgggctctggggaaggatgagagggtctcgcggccggaggggggcggcagggctgcaggtccacccccatccctggcctcaccgtgtctccgcctgacgcgaaggagatggacggcatgtggtggttggcgatgacctgtggcggcaggaggcacacgcggtcatgggggccccgcttcgagggcagggggcccggcagatggaccaggaccacagcgaagagtggggcaggggcagggatgtggggatggagacgtctcctggacaggcacccactgcagccgggtcctgggtcagcctggacgaccgaggctgggatgtggagtccccagcaaggaagggactagggccctaagggatgtgtggggtccgcaggaggtcacacgggaatgtgtgtgagaggacaaacctcccccactgtaacacttcacacatgtacctgcccagacgctcacacacacacaccccaagccccacacacatgcacacacacacacacacccgaagcagccacgggagggacggccccacactcctgactcccttgtccacgtgcaagggcacctgtgagtgcatttgcatgcttatctgcatgctcatttgtatgcttgtttgcctactgatctgcatgctcgtttgcatgctcatctacttgctcgtttgcgtggtcatctgcgtgctcgtttgcgagctcatctgcgtgctcgtttgcgtgctcgtctgcgtgctcgtctgtgtgctcatctgcgtgctcgtctgtgtgctcatctgcatgctcatctgcgtgcttgtttgcatgctcatctgtgtgcttgtttgtgtgctcgtctgcgtgcttgtttgcatgctcatttgcatggtcctgcttcatttgcttcccgtcactcaaatccctctaggccccagtaagcccccgataccagccacgtcctgagtcctccctacagaacatccacttctcagcccccatagggaccctcgaggctctccccttgccaaccccggcccagccaggagggtctgcttggagcctcagtatcctgtccatatagtggtcaggggtccatgcctcgcagggtgggggcagagatggaaattgcgtggaaatggccctcagtcacccccccgccagctccatccttctctagcctcctccctggagccccagctgcccctcaccgccacctgctgccaccacaccagctcagagatgctgtctcaccccaaactcctcacgatgatccatgctaacttctccgacaaggcgatgcctcctctttcagccacacctgagattcccctcctcaccacctcccagagccctccaggaagtctcttctagcacccagagcccagcacatgctcaggacacccctcacctggcctcacaatgcttcctaaaatctgttatttcctctatttctgcaattatagttttttgttttttggttttttgagacagagtctcactctgttgcccaggctggagtgcagtagtgcaatcttggctcactgcaacctccactcccaggttcaagcgattctcctgcctcagcctcccaagtagctgggattacaggcgcccaccaccacacccggctaatctttgtattttttgtagagtcagccatgttggccaggctggtctcgaactcctgacctcaagtgatctgcccacccctcagcctcccaaagtgctggggttacaggcgtgagccactgagcccggcctcacagtgctggggttacaggcgtgagcaaccaagcccgagcctggtctgcaattatacttttgttgtttgtttccacttgaggactgatagccagggtttatccccgcccctccccaggcactgtggatgttgggacggaccactctctggggtggggcgtcctggcccctgcagggtgctgagcagcgtccctgcccccacccactccatgccaggagcgcccctgtatcaggacggctcgcccaggtgggagcccctgagctgagccccgtgagggcagtggctgcacccccagctcctgctcagcggggcctcggctcgtctttctggataaacgccacctgctgcccgcccccagcaccccacctggctttgcctcctaggactcctggcccctctgggggtctggggacgccaggcgaagagggcagacccacctggcgcgtggcaggcacggagaggctgaggccatcagtggagatgtggatggagatgctcatgccggcaaagcgaaggttgctcttgcccaggacggacgccagggccttgttgggggcctgagttgggggcggagcacagcgagggcggctgtgggtgggggctgtcgaggggctcccaggatggccgcagcgtccccacagcccccgactgccccaccagccccacgagagaccacaagcctcactcacctttttcttccaggatccccggacgccaggcacggcctcatggagccggttgatggcttccctggggttgggaggagggggcttagagagtgtggtgggggtggccatggagggagctggggaggaaggggtcagagagggcgggggtctggggagggggcaggagctcagagaagggcgagagagaggggagaggaaggcagagagggaggggtgggagaggatcagggggcctaaagtgggcagggagggggctggggaacctgggggaggagtgccccacaggacaggtgcagcttgggcaccagcccactccacgtgcgtccttgcatccggcagaggcccggcccccagctctggcccctctaccaccctctttcccagggaccagtgtgtccctggcctcggcccacaaggaaggctcggcatcagatgtgggggttggagcagcgagcaggaggccctgagcctgacgcggggtccgtgtcgagatcctgtctgcagcctgagtggtggcaggagctgaccccaaacaagagcgcctcagaccactggtccccaggagaggttagaagtctacagggtcctgaaggggccccggaaatgtcggcgtcacgtggagaaaccagatcccccacccagggcatgtgggaattttcacagcacggccactgtggaaaacagcctgggggctcctcaaaaggttaaaaattggccagatgcagcggctcctgcctgtcatcctagcactgtgggcctgacacaaacaaatgcatgcaggcgcggcggcccccacctgtcatcccaacacttggggaggctgagacgggcggatcacctgaggtcaggggttcgagaccggtctgaccaacatggagaaaccccgtctctactaaaaacataaaaactagctgggtgtggtggtgggcgcctgtagtcccagctactggggaggctgaggcaagagaaatgcttgaacccaggagacagaggttgcagtgagccgacacggtgtcactgcactccagcctgggcaacagagtgagactccatctcaaaaaaaaaaaaaaaaaaggagcaaggctctgacccaggccacagcgcggacacacctcgggaacgccatgctcagtgagagacgccagacacacgaggccacgcagcgtgtgatcccattgctatgaaatgtccaggacaggccgatccacagagacagggaggggatgcgtgggtgccggggctggggaggggacggggagtggctgtgatggggacggggtgttttgatggggtaatgagaatgttcggaactagacagtggtgatcgtgtgactctgtgaagagcctaaagtctcaaactgtacattatatctcacatacgcacgtgtaaactgtctcacatggtttttttaagtctatacgaatggaatcaaccagttttcacagaaaaaaagggtgtcgctctcttccctgcttaagccctggccatatccacagcccctgtgattgctttccagacaccgcatagcatcctgaggtcaccgtgtggaaaacagagcagggacacggagacgccactgggccccggtcccagagggaacccgccaggccctgcaccccacgccgtgcggggacttgcccagcaccctgtgagcgaccggcgtgttctttccatcttagaggatcgaggtctgcagggcacggtgaccgacacctggcgtggggacagggcggagacgtggcgtgaagtgggagggaggtggggggcaccgaggctgcgtcctgggaccccagcgcggctgtcggagagcccatcgctgccgccctccagtgctgccgccctccagtgcgtcactcagccctacgcggccagggcagggttggaggctcacctggtcacctgcgtgcgcgtgttaaagtccagggagcgcatagagcggagaacctcgatgcagcccatgtactgaggggagagaacaggtgtcagatgccatcggaacccccgcagtggagccacgtcccttttcccagcagcccttcgccgcctccaccacccctggggtcgagccctttcctctgtccctggtggctctggggccgtcgtgcctcccccacctcaaggcccagccttgacactgtcctgcgagccgccccctctgactccaggcatgtttttctgtgttgctgtttctcaggagcctggtggttcccccagacgctctatgctgcttgttcatttaaccgtcttgccctcgtcggtctctttctgttccaccagcaccgaagccgaggagcgtggggatggtgcgatcctgagcacttccctatctccagcgcccagttcagggtctggcaaacagtggggcagacgtccagggcagccacagatgcacacactgctggcctcgccctccacaggaagtttgcgggcttctggcccagacagctgtttccatgaaaagggaattcaccatctcaatgactgataatactgagggacgagaggggcagaggcgtcccaccgagtccctgacctgcttcagtgccgtaaagggtgggggaacagggccaggaggcgaaggccacagcgtccttccaacgttggcccttgctggagggagggtaaggggcacagcccacgtcatctctatgaaatgtcctacagaggcagcaagagcatgtgtgggtgccaggagccggggaatgaaggctgacacgaacaggtttcctactggggtcatgagaaattctggaattagacagaaggggtggtggcacgatattatgaatgtacgaaatgctactgaactgtgaaaaatgcaacatgcaaaatgatgaataacgttatgtgaagtccacctcagtttctttaaatgatcaacacgcaaacactttgaccctgcagctccatttttaggactttaccccacagatacatcagcctgagggcttctgaggtgtgtacaggtcactgtgtgggccggcccaggctctgcccctctccacggctccatgtacctggagcagggagagcaaggagcagagacagatgtgagaatgcaggcaggaagcagaggccacaggacctgggctgtgatgacgggcaggggctcatcctgggccagctggggagccagggagcacttaagcagggcatggactaagcagcctcacctcctgttgaatggatgcatgatgggtggatggactgacagaaagatggcaggtggatggatgaatgaaagaatggatggaagatgaatagatgggtgggtgagtgggtgaacggatggatgatgggtgagtggatgatggatggatgggtagatggatggacaggcagatggacaatgaatggatgggtgggtggatggatggagggtggaaggatggatggatgggtgggtgggtagatgagtagatgagtggatgggtggatggatggatggacagatggatggatgggcgggtggatggatggatggatgaatgggtgggtggatgggtgggtggatgggtggatggatggatggacggatggatggatggatgggtgggtggatggatgggtgggtgggtggatgggtgggtgggtggacggatggctggatggatgggtgggtggatggacgggtgggtgggtgggtggatgagtgaatgggtggatggatggatgggtggatggatgggtgggtggatgagtggatgggtggatgggtgggtggacgggtggacggatggctggatggatgggtgggtggatggacgggtgggtgggtgggtggatgagtggatgggtggatggatggatggatgggtggatggatgggtgggtggatgagtggatgggtggatgggtgggtggatgggtggacgggtggacggatggatgggtgggtggatagatgagtggatgggtgggtggatgaatggatggatggacgggtgggtggatgggtggatggatgggtgggtgaatggatggatggacgggtgggtggatgggtggatggatggatgcatgggtgggtggatggatggatgaatgggtgggtgggtggatgaatggatggatggacgggtgggtggatgagtggatgggtgggtggatggatggagggtggatggatggacagatgggtggttggatgggtggacagatgggtagatgggtgggtggatgaatggatggatggatgggtgggtagatgagtgcatgggtggatgggtgggtagatgagtggatgggtgaatggatggacagatggatagttggatgggtggacagatggatggatgggtgggtggatgaataggtgcatggatgggtgggtggatgagtggatgggtggatggatggatgggtggatggatgtgtaggtggatgggtggatggacggatggatggatgggtgggtggatgaatggatggatggacgggtgagtggatgggtgggtggatggatggacagatggatggttggatgggtggacagatgggtggatgaatggatggatggatgggtgggtggatgagtggatgggtggatggatggacagatggatggatgggtggatggatgtgtaggtggatgggtggatggacgggtgggtggatgaatggatggatggacgggtgagtggatgggtgggtggatggatggacagatggatggttggatgggtggacagatgggtggatgaatggatggatggatgggtgggtggatgaatggatggatggacgggtgagtggatgggtgggtggatggatggacggatggttggatgggtggacagatgggtggatggatggatggatgggtgggtggatgaataggtggatggatgggtgggtggatgagtgcatgggtggatggatggacggatggatgggtggatggatgtgtaggtggatgggtgggtggatggatggatgggtgggtggatggatggatggatggacgggtgaatggatgggtgggtggatggagggtggatggatggacggatggttggatggatggacagatggatggatgggtggatggatgtgtaggtggatgggtggatggacggatggatggatgggtgggtggatgggtggatggatggagggtggatggatggacaggtggatggttggatgggtggacagatgggtggattggtgggtggatgaatggatggatggatgggtgggtggatgagtagatggatgaatggatgaacagatgaatggactctaggcatgtagtagacaggtcatacctaaaggaattagccatggtccctgtccctagcactggattctcccactgaggaggcagctttggtgggatgctggctgctcaatggctgtcttctctcaggcagagcatgtgcctctgggatgatgtctgtgccagtgtctggcgctacagggccatagggtgagggattctcattcccttacctgcccccttattaacacgtagcccactccggttgtgcggctgaaaccctgaactgtgtggtccatgggtcccgttgtggggacaccagcctagtgcacgggggaggtggggggcaaaccctctgtggcccacggcagctcacgagaggaaatgcaatatcctattcggttgagaacagggactgcaaactcagatgcctacagccttcaggatcagccaggtaaacacacgaggtaggatgcaatgcagtaacgataccgacacctcgctaactcagggcgcttgtcacgtgtaagtctctgctgcggacacgctgtgcacagcatcctttaatccactgcacgcagatccggtaatgataccaacacctcgctaactcagggcgcttgtcacgtgtgaggctctgctgtggacacactgtgcacgtggtctgttaatccactccacgcaaatccacatgccatgggcagcaatggcccctcgggaaacaggcccgggtgggagggtgactgacctcctgggccacacggcccgcagagctgggtcctgaacccacacccctgggctccaggatctgcactgctccccctgcacgacgggaagaggcggggacctcagctcactgcatgtcccacgctccacggcgcccagtgctgccggccatgtgcttttttaaaaaagagaccagaaattcagggcttttctgtgaaattctcccagtttgtaaatatcgatctagggctgaatatctgtgcccccctcaaaatccctctgtggaaacctatgccccactgtgagggtatttaaaggtgggcctttgggaggtgaggaggctatgagggctccaccctcaggactgggatcagtgcccttataaaagagaccccagacagagcccagccctccaccacgtgaggacacaggagaacacggccctctgtaaagaggccctcgccagacactgaatcttccggcgcctcgatcgtggccctcccagcctccagaaccgtgagaaataaatttctaggcctggcacagcagctcatgcctgtaatcgcagcacttcaggagacctaggtgggaggctgtctcgaagccaggagttcaagaccagcctgggcaatgtaatgaggcctcatctctacaaaagaaaaatttttaattagctgagcatggtgagtgtgggcctgtggtcccagctactcaggaggctgaggtgggaggatggcttgagcccaggaggttgaggctgcagtgatctgtgatggcaccacggcactccag[144 bp omitted]agaaaccccaactctactgaaaatacaaaaataaaaataaaaataaaaaaattagctgggcgtggtggttgcatgcctgtaatcccagctacttgggaggctgaggcaggagaatcatttgaacccaggaggcggaggctgcagagagccaagatcacgccactgcactcgagcctgggtgacagagggagagtctgtctcaaaataaaaaaaaaaaaagacaagcacagagggagatttgagagacagagacacagaagggaggggccgtgtgcagccgaggacaccaaggccggcccccaggcaccagacacgggagagaggcctgggacagagcctccctcagagcctccagcagaaaccagccctgcccacaccttggctcggacgttgggccccagaactgtgacagaacaagtctatgtttgtgtgtgtgtgtgttttgttttgtttttggggtttttgtttgtttgtttgagacggagtcttgctctgtcgccaggctggagtgcggtggtgcgatcacgactcactgcaacttccgcctcccgggttcacaccattctcctgtctc[131 bp omitted]tctcccaaagtgctgggactacaggcgtgagtcaccgcgcccggctgtctgtgttgttttaagccccacagtttgtggtggtttgtggtggcagccccgggaccctcccacagaagatggggaggagccctggcggcttcacattcaaccttcccctttgcaaattcagaaactgaggcccagagagaaggcatgacccagaacccaccccaggacgttaagggaaggagccactgtacaagtcagtaaaccgaagcccagagaggggatggcacctggccggcctcacgcacgcagcaggccagggcagatacaagccgaggtccccatgtctgcactcccagcctgggagaccgtccgagtctccgccaccgcccacgccagccaccgggacccacctcataggctttgccatggtctgtatcgatgtcatttacttggtattttccttctaaataaactccacttacaaacataattgcgtttactttttaaaggaaattgcaggaaacaactaaaatatctatcaacggatgaactgataaatgcagtggggtccatccgcactctggaacgtgacccagacgtgaaaaggagcaagtctccgatacgggccatggcacggacgcaccgtgaggacgccggacaggaaaggccacacagcgtgtgatcccatttctatgaagtggccaagacaggccgatccacagaggcaggaaggggacgcgtgggcgccggggatggggagggggtggaggggagggacggctgagggcaggcgataagtttccattttgcctgacgggagcgtcctggaactagacacgggtgagggttgcagaaccgtgtggctgcactaaatacaccgccctgcacagtttaaacagttgggattagggtatgcgaattatatctgctttttcaaaaatttgcatgagagccgggcacaatggctcaggcctgcaatcccagcactttgggaggccg[131 bp omitted]ctgaggcaggagaatcacttgaacctgggaagcggaggttgcggtgagccgagatcgcaccactgcactccagcctgggtgacaagaacaaaactccatctaaaaaaaaaattaaaaaattatatgagaaaaagaggaaacttcacactgcaaccataactccctggttttccattaaaataaatatattaataaaatgaaaagtgtccattcacacaagaaccctaaggttttgctaaaaccagtgcgtgaaggtttgctgggagctgggagccaggatgtctgcacagtgtcaacatctgtctccccagatcacgttccagggaaggaagaccggatgccggggccagggctggggaggccgcaggcagcgcttgggctggaaacgtgcacggcctggcctgcgagtggctcccggggcgtgcactgcgacgtccccatgcacccgagtcccaattccacgagtccccgcagatcttcctcattataagggaaataaacagagctttacgggggagaaaagtcaccttcaccaagtacattcatttcccagggctgccgtgagcaaaggccacacctgggggccacgggagcggatcctctccacgtcccagagccgggagtctgaggtcaagctgcgggcagggcctcgctccctctgaagccccgggggagggtccttcctgcctcttccagcttctgggggctcccggcgtcccgggcttgtggccgtgttactccatctctgcctcctccacacagctgtctccttctgtgcagatttccctcttcttagaggacacgagccattgcatttaggccccaccctatttcagtaactccagtgtggcctcatcttaactaaccacgtctgcaaaggaccttttccaaataaggacgtgagttttggggaacaccgttcgccccaggacactaggtgatcaaagtctccagcaccagtatcaggacaaaccagcacccgggggcctcctgacacgaagggctgggaaaacacagcacccctctgtgcgtcctgccaaaaacacaacctcgactcaactgcaggcaaacaccaggcagacacaaactgagggacggcagcccagcagccggtgtgcactcttcaacactactggctccatggatcccaggacggaacaactgtgaggctaaaggtggtaaaagagacaggacggacggggcaagtggctcacgcctctaatcccagcactgtgggaggccgaggcagacagacggcttgagttcaggagttcaagaccagcctgggcaacatggtgaaaccccgtctctacaaaaaaaaaaaaatacaaaaatacaaaaagtagccaggcatggtggtgcacacctgtagtcccagctactcgggaggctgaggcaggagaatcgcttgaacgcaggaggtggaggttgccgtgagccgagatggtgccactgcactccagcctgggcgacagagccagactctgtctctaaaaaattaaaataaataaaataaaaattagctgggcgtggtggcacacagctgtggtcccagcagcctgggaggtctcagcaagaggctgaggtgcaaggatcgcttgaacccaggaggcggaggttgcagtgagctgagatggcaccattgcactccagcctggatgatccagagcgagatcctgtctcaaaaaaagaaaaaaaaaggcaggatggctaaatgcaatgtgggatgggaaaataaaggttgctctgacaccgttgggaaaactggtcacatttgaatacgcactgaaaatgtgatcgcaggattgtaacggtacatttcctgactttgttaatcataccatagctatgctggagaaaatccttgtccttagactatataccctagcgtgtttgagggtagaggggtatcacggctgcagactttctcaattgttcatcaataataacgacagtaataataataatttatacagtgggagcctaaggtaggagaatcgcttgaacccgggaggcggaggttgcaatgagccgagattgcgccattgcactccagcctgggcaacgagagcaaaaccgtgtctcaataatgataataataataatttatacagacagaataaatgaggcaagatgttaataatcggccagtctaggtgaatgacacatgggaactctttgtactagtcttctttggaacttttcgtctcaatagaattccaaacttacaaaagctctacgtagtctactgttcttgtttctttgatctaaggttgaaactatttaaaggcaaatttctttgacaccctgcgccacgctgaccagtgccgccctccacccctggccaggaggacgcccctcccactggccacagcccccgtcagtgcccctggccatggctttccacaggggcgaggggtgtgtgctgccctgggggtgccgcggaaatgtggggccctgttggccatcatcgcgaggctgggcagccggcgctacaggaggggggggactcacaatgacaccgaactgtccccagggcctcggagcttcctccaggcatcttgtggggaaagccttccatgactgccacacgcctccaacctaactccacgtggcccatgacgcaagagagtggcgcgttttcgtgtgcttgcttttttattgtggtaaaacacacataacataaaatttagagttttgactgtctttaatcgcacggttcagtggcactcagcgcattcccgtggctgtgcagccaccaccaccgtctctccagaacgtcctcatcttcccaaactcaaactgaccccacaaaacacttactccccgtcccctccccagccccatcctactttctgtctctgtgaatctgatggctctggggacctctgatgggtggaattgcacaaagcttgtccttctgtgtctggagtctctcaccgagtgagacatcctcaaggtccgtccgtgccgtggcctgggtcagagcctcgttccttttcttggccgcgtcgtatttcagcgtgtggatggccacactgtgttgatccactcatgcctgggtcacagcctcgtttctttccttggccgcatcatattgtcatatttcagcatgtggatggccacgccgtggccacgtcatatttcagtgtgtggatggccacgccatggctgtgccgtatttcagcgtgtggatggccacgccgtggccacatcatatttcagcgtgtggatggccatgccgtggccatgtcatatttcagcgtgtggatggccataccatagccacgtcatatttcagtgtgtggatggccacgccatggctgtgccgtatttcagcgtgtggatggccacgccgtggccacatcatatttcagcgtgtggatggccacgccgtggccacgtcgtattttagcgtgtggatggccataccatagccacatcatatttcagtgtgtggatggccacgccatggctgtgctgtatttcagcgtgtggatggccataccatagccacgtcatatttcagcgtgtggatggccacgccgtggccacgtcatatttcagtgtgtggatggccacgccgtggctgtgctgtatttcagcatgtggatggccacgctgtggccacatcatatttcagcgtgtggatggccacgccgtggctgtgccgtatttcagcgtgtggatggccacgccgtgggccacgtcgtatttcagcatgtggatggccatgctgtgttgatccactcatccatcaacagacacctggactgtttccacctttgggctgctgggagttatgctgctgtggccgtgagtgtacaaacatcccctcaagtccctgctctccatttctgggaggtatatatccaagaagtgaaattggtggatcataaggtaattctctttaactttttggcattttttgtttgttttgagacatagtctcactctgtcgcccaggctggagtgcagtggcgtgatctcggctcactgcaacctccacctcttgggttcaagcgattctcctgcctc[134 bp omitted]tgcctcccaaagtgctgggattataggaatgagcctccgtgcctggcagcatcgtttttatacaagttggactaaaatagttgttcactattttagaagccaaatcgtccgtgtgactccagccgtggtgtcggagctgcagaatggcagcctgcatctgccccgtctgtggctgtcacaggaatggtggcctttgtggcggcctctgtgcttcccggagagtggaccctgcacatttacaggctgaaacatattttgagttactaggaatcaccaccattgcgtttctccgtttcactgcggttggggcatcgtactgacttggggggaattcctgcgtaggtgtgcgtttctccatttcattgaggttggggcatcgtactgacttggggggagttcctgcgtaggtgtgcgtttctccgtttcattgaggttggggcatcgtactgacttggggggagttcctgcgtaggtgtgcgtttctccgtttcattgaggttggggcatcgtactgacttggggggaattcctgcgtaggtgtgcgtttctccgtttcattgaggttggggcatcgtactgacttggggggaattcctgcataggtgtgcgtttctccatttcattgaggttggggcatcgtactgacttggggggagttcctgcgtaggtgtgcgtttctccgtttcattgaggttggggcatcgtactgacttggggggaattcctgcgtaggtgtgcgtttctccgtttcactgcggttggggcatcgtactgacttggagttcctgcgtaggtgggtgttacaggtacacttgggtttcatttcaggagtgaaggatcacagaatgcttgctataaatagtggtagttgatcggcaggacggccacacgcagctgcagctggtggatctcagacctgagtgtgactcagaatcacctggaggactcacaaaacgcagctctccaagccccccagagtctctgacccagcaggtctggggtggggctcgagaatcagcatttgcaacaggttcccagatgccgctggtctttaagccagtttggtggccccgttcccttccacaagtgaagggtttgccatttccagccaatggaggagggagaacggccggagtctctcacaaagagctccaggaagggatgacctctgctcccagtggacgtggccgggtcccagcgacgtcgggtgctgtggccaccattttgtgaccctgaaggtcgccaagccagcgtgcagaggacggcggcacagaaagatgggagagactgtggtcacaccgtcctgaaaacagcccaatgttgtctggccttggaagctgagcagggtcgggcctgattggtacttggatgggagaaggacagaaagaacccagatatgggttctttgttctcagaaacaaaacctgagttttgtttctgaggcagggtcttgctctgtcacccaggctggagggcagtggcatgatcttggctcactgcggcctcgaattctcaggctcacgtgctcctcctgcctcagtctcccacatagccgggaccacaggtgtgcaccaccctgcctggctaatgttttttcttttttggtagagacagggtttcaccaagctgcccaggctggtctcaaactcctgggctcaagtgatcctgccgccttggtcttccaaaatgctggattacaggcgtgagccaccacgcccggccagaacccagatctttagggatgctgtcgagccatgggattcatccaccgtgtcaactggccacacctgacccctcgccttcaaggaaaagctgcatttggagctgaaccatctccagcaccctctcacaactccccgcacctcccagcttaagggacccgcgatgcaggaaggatgaagtgtcattttgccgaccgtgtcccagtttgcgtccatcccccaccgggcctgggctccacgcacctggagcagagccagacacgcacaggaaactctccctgaagtgctcacgaggtgaggtgcgtgagggcaccgcagagagcaggacggcctgactcacgggacttctgtgtatggacgagcccagcgccaaaatggtacgtgtgggagaacacggggtcggtgtccacagaccttggcacgaactctggcctctccaggagacaagctctgtgtctttctcaacagagacatcttgctcagatctacgccttcgggtgaagcccaaagatcaggcgtcaagattcacccagaccgagctgtccagcacggcagctgcttgctgcctgtgaccacttgagaaaagtcaggtaaaatgaagctggcactgcaacagcacaggccacacctcgaggcccagccgcccatgtgactcacggcagccacactggacggtgcagacacggacggttctgctgggcagtgccgggctgggctcatgagacccacggcaaagtcggcgggggattctcaggaaaaatgtccccattcacaaaaggagccccacagagacaggggaccctgttctgccaaaccagagccactgcctttcagccaggggaggaactgacccagcagaggccccgggaaggcggtcggtctcccgtggctgccctaacagatccccacaaacggggcttaagacaacagaaatgggccggacgcgacggcgcacacctgtcatcccagcactttgggaggcgcaggcgggcggatcacctgaggtcaggagttcaagaccagcctggccaacagggtgaaaccccatctctactgaaaatacaaacaaaattagctgagcatggtggcgggcgcctgtagtcccagctactcaggaggctgaggcaggagaatcgcttgaacccgggaggcggaggttgcggtgagccgagatcgcgccacggcactccagcctcagcaacaagagggaaactctgtctcaaaaaaaaaaaaagaccatagaaatgcttcctcacacaggcctgagggccggaagcccgtcccctctggaggcagcaggggaaggcccgtcctgcctctcccagtgctggtggtggccggggctccctgacatccttggcccgtggccgcatcgctcgtctctgcccctctcatcctgtcccgcgtccttctctctgtgccctcactcagcttctcataaagacggcagtcaccgggtcagggtgacctgaatccaacgtgaccttgtttaatgacacctgcagagagcctgttccacagaaggcctcattttggggttccaggttggcatgaatttcggtgaaataacaatgacctggacccatgacaaagtcactgagctgctgaattaaccaaccccagagccgccgaccccgggttcttctcgcaggagacaatcaaggtccctttggcgcccagcagctccgagtcaggtctgtggtgacagccctaaaggcatcgcgagtgccatgacccagggaagggctctcgggcagctctttgacctgctgtgcctcagctgcctcatctataaaatgggtggaagccgcagggttgtggggagaatggaacccagggctcctcggaactcagcaccgcgcaggactcggcgtgagcctcggcgccggaggtactgcatttgcaccgatgctgcccacggcgctcggacgcggggcccacgccgctgattatccggcgtccaacttctctcccacacaccgggatcgctgcaggattctggggggttctgcgatgccggctgagtcgcccggcccatccactccctcttgctgctatcaccaatcaccacaaattgagtggctccaaacaacgcgagctaatccgcttatgtctagagctcagaagtctaaaatcaaggtgtgggcagagttggttcccaatctgctccgcctttcccagcgtcctgaggggcccacatcccttggctgggggccccttcctcccggttagcagccacagcgcagcctcttccggtctctctctgactctcaccccctgctgcgaggacaccgggcccccaaatcatcccatctcagggttgctcactcggtcccacctgcaggtcccctgtcgccgtgtgaggggcaccttcacagaatccgagggtggatgtggacacggggccgttgctgtgccccacacaggtgcgtgcgtgacgagtgccctcagaatgttctctccggctcccgcaggaggaccctcagccccgggttctggtcctgcttttcactgcgtaacctcagacacagctcggcctctctgtgcctcagtttccctcagtgcacagggtccctccagtgtggaagagccctgcgggcctgagccgccggccgcagcccccgggtgatggggcttggctattcccctccttaactcaagcttccctgtgaccaggagggaccggctgtccctgtgcctgctgtgatgtaggtgctgggagacggggctcctgggggacagcgctgggggctgaggccggtcaggctccctgggggccagggcccctggtccatcagcaactcctccgggctccaacacaggctcattgtccacttctcccctcacctaggtcccctggcctgggccaccgccgtccctcgcagcctcctcccgggtctctgctgcccttccagaccctcctcctccctcagcaacacttccacacggcccctggaagggctttcaaaactgcacactctgcgccaccccctacttaaaaccacccccactcctcaccacagcccacagagagagtcccgctccctctccatcagctccagtctcatggctctccttgccgtgacgcacacgcaccaggtccgctccctgcgtggggcctttgcacctgctgtgccccccctagaactctgtctgcaaactccaccgcgtcaggcctttgcacctgcacctgctgtgccccgtctagaactctgtctgcaatccccaccacgtggggcctttgcacctgctgtgcccctgcctggaactctgtctgcaatccccaccacgtggggcctttgcacctgctgtgcccctgcctagaactctgtctgtaaacccactgcgtggggcctttgcacctgctgtgccccgcccctagaactctgtctgtaaactccacagtcaggcctttgcacctgcagctgctgtgccccgcctagaactctgtctgtaaacccaccgcgtggggcctttgcacctgctgtgccccgcctagaactctgtctgcaaaccccaccacatcaggcctttgcacctgcacctgctgtgccccgactagaactctgtctgcaaaccccaccacatcaggcctttgcaccagcacctgctgtgccccgactagaactctgtctgcaaaccccaccacatcaggcctttgcacctgcacctgctgtgccccgactagaactctgtctgcaaaccccaccacatcaggcctttgcacctgcacctgctgtaccccccctagatctctgtctgcaaacccaccatatcaggcctttgcacctgcacctgctgtgccccgtctagaactatgtctgcaaaccccacggccggggtttccatggctcaggtctcagcttcaaggtcgcctcctgggaggggcagccgcccagcctcctgctctaatatcacacgattttagctctgcagagccgctaccagaacctatttcctcatctgtttgtcctcttctgattgactgtctctcctactggaatccaagctccttgagagcaggaacgaggtctctcattgtctactcatcatctgtgccgggcaggggaagcgtatgctaaatatttcctgcagtgacggaaagcagcagttatcccccaacatccggagccccaacaaccctggcgtctgaattctgaacattctaaatcccacatccacggccaatggccacacctgactggtcccaatggatgtggtgtgaaggaagcgcacgcgtcctccgtggaacacgccggccgtcggcgttaaacttgtaggacaaaccgccgggagacggcgagggcggcccgatgccaccagggaaaacagacccaaccaggcctggcatccgcacagacccgggggaggcggaagtgggtcccggggaggcggaagcgggtcctggggaggcggaagccggtcccggggaggcagaagagggtcttggggaggcggaagtaggttccggggaggcggaagcgggtcttggggaggcggaagcgggtcttggggaggcggaagtgggtcccggggaggcagaagcgggtcttggggaggcggaagtgggttccggggagacggaagcgggttccggggaggcagacgcatgttccgggggacggggaagtgggttccggggaggcagacgcgggttccggcggagggggaagtgggttccggggaggcggaagcgggtcttggggaggcggaagtgggtcccggggaggcggaagcgggtcttggggaggcggaagcgggttccggggagacagaagcgggttccggggaggcggaagcgggtcccggggaggcggaatcgggttccggggaggcggaagcgggtcctggggaggcagaagcgggtcttggggaggcggaagtgggttccggggaggcagacgcatgttccgggggacggggaagcaggttccggggaggcggaagcgggtcctggggaggcggattcgggttccggggaggtggaagcgggtcctggggaggcggaagcgggttccgggggacggggaagtgggttccagggaggcggacgcgggttccggggaggcggaagccggtcttggggaggcggaagtgggttccgggggagggggaagcgggttccggggaggcggaagcgggtcttggggaggcggaagtgggttccggggaggcggaagcgggtcccggggaggcggaggcgggttccggggaggcggaagcgggtcctggggaggcggaagcgggtcttggggaggcggaagagggttccggggaggcggaagcgggtcctggggaggcagaagccggttgtactgcgcaggccgagcgcgcctggggaccacacgtgggggagtgaggtttcacagccagcttctgggggctcccacaggctttggtgggcccgggcttgaggcccccacctctgcctgtctcctaacggcccgctcctctgtgcatctgagtctaaagttccttctccttacagagacccctgatccaggtaggcctcatcttgactaggttacatctgcaaggaccctgttcccaatataaggtaataaggtcagactcctacggcacaggaattgtagggggacccttctcaactcggtgtagggggaaggaccccactgaacccagcgtagggggaaggaccccactgaacccagcgtagggggaaggacccctctcaactcggtgtagggggaaggaccccactgaagccagcgtagggggaaggaccccactgaacccagcgtagggggaaggaccccactgaagccagcgtagggggaaggaccccactgaagccagcgtagggggaaggaccccactgaacccagcgtagggggaaggaccccactgaacccagcgtagggggaaggacccctctcaactcagcgtagggggaaggaccccactgaacccagcgtagggggaaggacccttctcaactcagtgtagagggaaggaccctactgaactcagcgtagggggaaggaccccactgaactcagcgtagggggaaggaccccactgaactcagtgtaaggggaaggacccttctcaactcagtgtagagggaaggaccctactgaactcagtgtccagaaaagcaaagacacaacccaatgtgaacacaggctaatgttcctggccgcagaggccgggaggagctgggagcacccaccggtagtggcgtgcgggagtggctgatcattttcccagacgccgtaatgactgcagctgtaggacagctgctctctcagaagacgggggactatgcacggcgctgtcacccctgcaggtgacttcacacggtttactataaaccacagagaggggcagacccgtcagcagaggggaaggttaccctcctaggtggaggcgtgctgtgtccaggcgcccgacttccccgtgtgtttgaaaaggttcatttatcataagacccaaggtaaataaacaaaggccgcttccttggccgccctggaagtccctgctgcctcccatctggaatcctggggtctgtccgggcgccagcccctttccaaacaccccttcccgcacccccaccgcaggccagcgtctcgggccccgtctgtcattcgtgaacagctgtccggggggctccggtggcagagacgccccggccgctcgccgctctcggcctcgcccgcccagtccgagtggggggcggtgcacctgcgcatgcgcgcccctcccccgccgccctctccccgcccctccccacgtgacgccgtgggaacccggaccccagcgcctccgggtgggggcagccgccggccgccggccggggatgggggtccggggtggcgggagagcaggaaggatggggaggggacacctggctcgcggggtccgggggtcccggaggagagggtgggggaggggaggccgccgcgaacgggctcccggggggggtgggggggactcacccgcacgacgtaggagaccccgggccccaggaccctggcgtcggggtgtagccagccgtgcgcgggtttgtggatgaagctgcccttccggatccactcggcggcggcggcggcgtccccggaccccgccgccccccgcccgccccgcgacccccgcgaccccgcgccccgacagcggctgagcgcgggcaggggacagggcgcggcgcagcggggctcgcaggcgcccaggacggcggccgccagcgccgggacgccccccgggcccgccggctcgggttgggggtccgcgccccccgaggccccagccgcccgcgccgccgccgggccgcggcccaggaagccgcccggggccgcgaacttccactgcggcattcggggcagcaacgcgcagaaggtggtgggcgcctcgggctcggggggcgcggggggcgccgggggcgcgcgcccgcccggaccctgcgtcatggccgcggccgcccgacggagcccgaccgggcgctgcgcctggcgcggaggaagccctcccgctccgcccgctccctcccgccccccggcccggtgatgtcatccgcccggcccagcgcgcagccgcggggggctgcgcccctgggaccccggccctcctcgtcccggagcctggccgcgaggctggggaaactgaggccctccgaggacaccgggcgctggcctggaacccgcagccaaggcgggacggggctttgaacccagaaccccgtcagcgaccctccccgctgcgccccccacccccgcccgccgcccaagttcgcagaaggaccgagctggagaagcttagaaattccacatcccttctttcccctatttcctagtggggaaactgaggccccgggaggcgcggccagggaaaagagaaccccagaccctaaggtcagcccctccctctccgttgttgcagctagaaggtaccttagggtcacccctatttcttagtggggaaactgaggcgcggggaggggaaggggcgcggccgagggctcacagacgaagctcaaacccaggagtgccggctcgggggtggggggggggggcggggctaggagcggagccgggcccctgctctgcggcctgtcccggcctcagtttctccggctgtaactcaggggagcgggctggagggtcgcggcccttcttccctcacttctggggagcccagtcccgcaccagctcatctgagctctgggcctcagcctcccaggccggtcgctccatccccagcctcaacctctccgagaccggccgcaccttccctggcctcaagggtcggttccttctgcaccagaaaacggggtgtcactgtcaccccgggacccagcctcctggcccgacttggctggagctcccctgcacctgccccgccccaagcagggctgattgccgggaacaaagggaggggccgggacgcgctggcaggtggggagggagggaggggcgaggctgcccggagcccgatcgataattcaggggatgagatcacagccggcgccgcccgcggggccggggaggtgggggaggggagcgaggcgcgcggtcgcgatcggccgtctctgccgcggcgcgtgtcggactcagcccctgcgcgtccgcgggaggagcagatcgtgggcgcgattggtcgggctggagccgcggctggacctgcgcgcggtgtgtgtgttgtgcgcagggtgtacgctgtgtctgggtgcgtgtccaggcatatgcaggggatccaggctgctgggtcctggggtgtgttcacctaatgggtaaagggtgggacaggtttggcggccctaggctgagggctgtgggctgaggagagagcagccccaccaccccctctctgcgccctgcatgcctcccaggctgcatccctcagggaggtcccggggcagtgtcgcaccctcccaagctccgggattagggtctttctggatgggaggtttgtaaggtggtccaggtgccatccctccctggcacacagagggctcagtcacacggcacccccggtgtgtttccttcctgtcccttggagacagtggcaggaactcagtccaacatccagagttcaaatcctgacatcagactgaggtgggggctcacagcatgccccaggacaaatgtccagtctctccaaagcaccatttcctctcagtagatgcccctggtcctgagttgctatgaagcctagatgatctttattaatatccaaaacatagcaagcagctactgatggcagatattagaatacctcaagctcctatacatccttcaaaacccagcttcaatattgcctcttccaggaagcctacctggctgcctgctcaaaagcttggctccacctccggcctcccctcgccctgggtctctcttctggtctctcagaccccctggccactggagggctacgggtctggctctggagggcggcgttcgggtctcttttctgtgacatcaatagacacgttaaggccgggctcggtggctcatgcctgtaatcccagcactttgggaggccaaggcaggaggatcacaaggtcagaagatcgagaccatcctggctaacatggtgaaaccccatctctactaaaaatacaaaaaattagccaggcgtggtggcgggcgcctgtagtcccagctactcgggaggctgaggcaggagaatggcgtgaacccgggaggcggagcttgcagtgagccgagatcgcgccactgcacttcagtctgggcgggagtgcgagactccgtctcaaaaaaaaaaaaaaaaaaaagacacattaaatgagtaagcacatgtgatgctgacagctctccagcccaggaaaggtttattggctaagcaactgtagaaggtggagtgggaaaggcacaggcctcggggctgcctccagcctgagtttgggctgggaccggggctaacccaagctgtgatggggatccaggccctagtggagctggacgccgagttctgggacacaggaagctccatctccagccagctactggggagggccggaaggtgtccctttccccacctggcctggcctggcctggcgtgacctggaagaaactggggcactggaaggagactcaccctgcaccctgcacagggccatgggtcacagcccccagggactggaaggatcaggtgtcctagaaggacctggacagttcaggaaaggggagggaagactcctttcccagcccctctcgccttctagcccctccagccaaagccaggccccaggagaggcccgccagccccccgttcactgtgtgggaaacaggcctggcctagcagcagcggccgggcagcctgtgccccgcaggccgggagggcgtggtggcggccatggtgctggcccgtttcgagtggcggatgcccatagagaacgctggagccctggctttgttcacggtgacctgctctgggcagtgggcgccagggccgggggtctcctccaggggtcgcggggcccggggccgccccagcatggtgaaggcaggcaggcgctggcggtaggtgtttgcgtccgggctgtcgtactggcccgggcctggtatctcagcaggatcctgcggggggcgggcggggggggtgcggcccaccaccgtgtagctggggctgctgggcttggtgaagatctgtgagccccacagagggggcatggtgtaggcattaggggcaggggctgaggtgtccaggggcttcagggggaggcggcagcccagggtgaaagccggcggtgtccgatggcgcacagggggcaccttctctgggctgtaggccccagggcctggcgtcacctccggacctgagagagtggggaaggaaaggtggcactgatgtcctcacctgcccagagacccggcctggctccccatggcccacatgcaccctggagcttacaacgcttctcaagcagcctgggtgcctttctctcccttccccatcctccatacacatggtctgtgtttcaagcctccaggactttgcccaagctggacccagggccaagcacgccttcattttccacccctcctccctgctgccttccccagcccatccagggtagagccctcacagcccttccagagccccacagcctgggttttcccctctctccagacgtgagcacactgaggtgggatggtctgcacctgcatctaactgccccaccagactgggatcccataaaaaggaaggcatgtcaaatttactccaactctccagcagttgactgtctgagttgatgggtgaacaggataggtaggaggtgagtggttgagcggggagtgaatggttcatgaagggatttgtaaatggatggatgagtggatgatggatggatggatggatggatggatggatggatggatggaacggttgataggtagaaggaaaaaaggaaggattcatagatgagtgggtaggtgggtggctgaatgggtgggagggtgggcggatggatggatggatgagtgagtggatgggtggatagatgatggatggatggatgggtgggtggaaggatggataggtggatgggtgagtgggtggatggatggatgggttgatgagtggatggatggatgggtgggtgggtggatggctgggtgggtagatgctaggtgggtcaatggatgagtggatggatgggtggatagaatgttgggtggatggtggaaggaggggcgggtggatgggtggatggatggatggatggatggatgatgagtgggtggatgggggatggatggatgtgtagatggatggatggatgagtgagtggatggatgaatgggtaggtggatgggtggatggatgggtatgtggttggatgggcgggtggatgggtgtgtggattgatgggtaggtgagtagatggttggatggatgagtgggtgggtggatagatgggtgggtgggtggatgggtgagtggatgggtgaatggttggctggatgggtgagtggatagatgggtaggtgggtggatggatagatggatgagtggataggtagatgggcaggcaggtgggtgggtggatgggtgcaggtcggtgtgtggatgggtgtgtggatggatgggtgggtggagggatgagtgggtgggtagatggatgggcagatagatggttgtgtgggtgggtgggtggatagatgaatgagtgggtaggtgaaaggatggacagatggatgggtaggtggatagatgggtgggtgggtggatagctggacagatgggtaggtgggtggatggatgagtgggtgggtggatggtggatggatgtgtggatagatggatggatgggtgggtggatgggtgggtggatgggcgggtggatggatgggtggatagatggatgagtggatgggtggatggttgggtgggtggatgctaggtgggtggatggatgagtggattgatggatggatagatggttgggtggatgctggaaggacgggtggatagatggatgggtgggtggatgggtgggtggatggatgagtagatggaagggtggatagatggttgggtgcagggtggatgtatgggtgaatagatgggtgggtgggtggatggatgagtgaatggatgggtggatacatggttaggtagatggtagatggatgggtggatagatggatgggtgggtgggcgggtgggtggatggatgagtggatggatgggtggatacatggttaggtagatggtggatggatgggtgggtgggtggatggatgagtggatggatgggtggatagatggttgggtggagggtggatggatgagtggatagatgggtgggtgggtgggtgggtggatggatgagtgaatggatgggtggatacaaggttaggtagatggtggatggatgggtggatagatggctggatgggtgggtgggtggatggatgagtgaatggatgggtggatacatggttaggtagatggtggatggatgggtggatagatggatgagttggtgggtggatggttgggagggtggatgctaggtgggtggatagatgagtggattgaaggatggatagatgtttgggtggatggtagaagcatgggtggatagatggaggggtgggtgggtaggtgggtggatggatgagtggatggacgggtggatagatggttgggtggagggtggatggatgggtggatagatggatgagtggatgggtggatggttgggtgggtggatggatgagtggattgatggatgggtagatggttgggtggatggtggaaggatgggtggatagatggatgggtgggtgggtgggtgggtggatggatgagtggatggacgggtggatagatggctgggtggagggtggatggacgggtggatagatggttgggtggagggtggatgggcgggtggatagatggatgggtgggtggttgggtgggtgggtagatggatgagtgtatggacgggtggatagatggttgggtggagggtggaaggatgggtggatagatggatgggtgggtgggtgggtggatggatgagtggatggacgggtggatagatagttgggtggagggtggatgggcgggtggatagatggatgggtgggtggttgggtgggtgggtggatggatgaatggatggacgggtggaaagatggttggtggagggtggatggacgggtgggtagatggttgggtggagggtggatggatagatggtgggtgagtgggcaggtggatgggagaatggagtcaggcaggtgtgtcaggtgtgcgggcaaactgttgggtgcctgtgaaggatactgccgatttgccacagtccccattcacctctcacctcctgacacctaggccagctgcctctgtggccatgtgtgcccagggcctctgtcatcctgacccacttcactcattcagttctcccagccccagtgggcactgcagtggcggcccctcctccgtgtcccttggatttgatcactccaaagactctgcattctaagaactccaaggataagagggggagggaggacagggcaggagagtcgctgagaccctggaaagcaggtccttgtgcggctgcttggctccagtactcaccccgagacttggcccggccctgcatggagtaggcaggggtgcagctgcggccaaagcgtgtgactttggggtccaagaagtagatggggcccgggctggtgtcctgaggtggtgctggggagaggagcccagagtgctgagagtgattctgaagacagtgcctgccccaccgcccggcctcagtgcccctcttggccccgagacactcccaccaggtcagaggccaccccagtcccatctcggaggggtcaccccaggggccctgagttgtggctgcctgaactgggtgcctcaggtctctgctctgactctgtctcctcacagtcaaagtgattctgctctgctgctgtttgtagccacctctgcccctctaacctctgcgcaggtgtgggctggagaaccagctcgtgggtttgttggaactggacataattaggctgggtgtggtggtgcacacctgtaatcccagcactttcagaggccgaggcaggagggtcacttgagctcaggactttgagaccagcatgggcaacacagcaagatcccgtctctactaaaaatttaaaacttagccagacatgttgacatgcacctggggtcccagctcctcggaatgct[131 bp omitted]caagagcgactaggctctgaaccagggcttcggcttgctggcaggtcgcatgcttaagaggggggctcggcgttggaccacgttcaaatccagcagggcctcttgtgagctggtgaccttggccaagttatttatcctaagcctattttcctcatcagcatgttgagaaaatcaaaaagtgagaggatccacagaagggagtgatcctgtggccttgcacttcccgattgagaccgtttgctgctttcaccattattgccacgccaaagcacaaccagtgacagatgcgcaggcacctgtgtgtagcagcgtgaccggtgttcacggccccacagaccgtctgtgcacacatgctgtacatgtggcagtgagccacgggtgagggaggaaacgtcatccacaccttcgccctcccctgaggagtccgtggcacgcagtgtggcccagacacggctccagacctccccgaaacatcatccaaacctttgccctcccctgaggagtccgtggcacgcagcgtggcccagacacggctccagacctccccgaaacgtcatccaaacctttgccctcccctgaggagtccgtggcacgcagtgtggcccagacacggctccagacctccccgccacaggcacaagtacttgcacatacgctgtggtccccaacgcaggctcactggccagactccaagggtgatcactgacccttagccacagcctcatcctttgttagactggcaggagggagggggtctatttttagccccttccccaggccctgggcaaatacagtcccccaggactggaagaggctggggagattcttttttttttttttgagggagtgtctcactctatcgcccaggctggagagtgcagtggctcatggctcactgcagcctcgacctcctgggctcaagcaatcctcccacctcagcctcctaactctgggaccacaggcatgcaccaccatgccctgctaattttttattagaaacccttgatcatggctgggtgcggtggctcacgcctgtcatcccagcactttgggaggctgaggcgggtggatcacctgaggtcacgagttcgagaccagcctggccaatatggtgaaaccctgtctctactaaaaatacaaaaattagccgggcgtggtggcgggcgcctgtagtcccagctactcaggaggctgaggcaggagaatcacttgaaccccgggaggcagaggttgccgtgagccgagatcgcaccactgcactccagcctgggcgatagtgtgagactcagtctcaaaaagaaaaagaaaaagaaaaagaaatccctggtcataatcccatcgcccctccacagatgcctgggcctcactcacgtgaccacagactcgcctcaaagtgctcactgtgcagggcttagccatcaggactccccatgctgaagcactgaccttggcctctaccctgcacctggaaccttccagccttttcttctgccctccccaacccctggctcagtgccccgtgagaaatgaacacaccccagctcatcatgacatcactcatctcaaggcctcagcctacaaacaggctctgcctggagttcagttcttctgggggctccaccaaactcctattcatcctacaaaacccagatcccatgttccacttccaagaagcctaccctgggccttcagcaaagtgtgcacgatccccagtccaccagcctccccacgctgtctcgggcccaggaggtgtcctgagactggatttgaacctgggaactcagatcggtctgggtcataggctaagttctttttttttttttttttgcgacggagtctcgctctctcacccaggctggagtgcagtggcacagtctcagctcactgcaagctccgcctcccgggttcatgccattctcctgcctcagcctccctagtagctgggactataggcgcccgccaccacgc[187 bp omitted]tgacgccttcactggcattctgggaccccttgcagcttcctgagtcccagtgtgggctgggatttttgctcattctgaaggctgagaacaggctgctgtcctgcccctcctccagccgcccctcccagcaggcctctgtccaaatccccacacaagacccttccgaccgcgctcccagcccagctgggaccttggagcagcggtagaaaatggagggatggaatttgggagccctgagacctgctggcccgtggtagcagcgccactgatgaacaccaacagctccctgggtgccgggcggggtccacgccggagctgcttcactgcgcccgttctagacaggagcaggcaccatggggcaaggccaccagcctgtggcacagcgagccggtgcaccccatgcctgccctcccgcaggcagccgggaatgtccacagagatacaccacagccctgtgagacgggccaggcccggggagcccccaccttcatggtggagaaactggggctcagggctcagcctcacacccgacagcacacgtttactgagcacttactattttttcttttt[132 bp omitted]tctcctgcctc[211 bp omitted]ctgtcgcccaggctggagtgcagtggtgcaatcatagctcactgcagccccgacctcctgggttcaagtgatcctcctgcctgggcctccccagcagctgggaccacaggcacacactaccacacccagcttttcggctacttttaaaagcatttaatcctcacttaatgaatctcaaaaaggcatctaatccttacaacaggcctgtatggagtctgttattatttttaatataatgttaatgtttt[131 bp omitted]cctcagcctcccgagtagctgggactacaggcgcccgccaccacgcccggctaatttttctttggtatttttagtagagatggggtttcactgcgttagccaggatggtcccaatctcctgacctcgtgatccgcctgcctcagcctccttaagtgctgggatttcaggcgtgagccaccgcaccggcctgctattgttaacttttaacagaaactgagttgcaaagcacttaagcaatttgcctgagtccaggcagcaaggaattgcaaacacggtaaggcaggtacaggtactcacctccttactgcgctctttctccttccattctcattatcaatgaaaaaacagagagggacagcagcttgcctgaggtctcacagtaagtaggaggtggagcaggttgtacagcccagccctgcctgcttcctgccgcactaactgggggcctggatctaaggggtaaggagacccatcagtgctcctggggggagattggaggatcagggaagcctccagccgcccactcgcccgccttaccctcactgggcctccggacgagcgagtaggcgggactggccaccctggtgcagtcgtggttgatgaagcccacggtggacggcaggacatacaagcctggccccgagcctgcagcccaaagccctcaggtcacctcctgggcccagattccccgaagaaggagccctggacccagctcctgagccttagcctgggttcccctctccctccatggtgaggattgggggccccggggagcaagaggctgctgcccgtcggggacaaaatgtgatgcctgcattgtgagtcagacatgaatcacagaggaaaagctggggacagcagcccccctcaccctggggcacagacagggagactggggcctgagcctcccagagatacacggtcacaggtggggaaactgaggcctgagcctcccagagatacacggtcacagatggggagactgaggcccaggcagagatacacggtcacagatggggaaactgaggcccaggcagagatacacggtcacagatggggaaactgaggcctaggcagagatacatggtcacagatggggagactgaggcccaggcagagatacatggtcacagatggggaaactgaggcccaggcagagatacatggtcacagatggggaaactgaggcccaggcagagatacacggtcacagatggggagactgaggcccaggcagagatacacggtcacagatcgggaaactgaggcctgagcctcccagagatacacggtcacagatggggagactgaggcctgagcctcccagagatacacggtcacagatggggagactgaggcctaggcagagatacatggtcacagatggggagactgaggcctgagcctcccagagatacacggtcacagatggggaaactgaggcctaggcagagatacatggtcacagatggggagactgaggcccaggcagagatacatggtcacagatggggaaactgaggcccaggcagagatacacggtcacaggtggggaaactgaggcccaggcagagatacacgatcacagatggggagactgaggcctgagcctcccagagatacacggtcacagatggggaaactgagggccaggcagagaaacacggtcacagatggggagactgaggcccaggcagagatacacggtcacagatcgggaaactgaggcccaggcagagatacacagtcacagatggggagactgaggcctgagcctcccagagatacacggtcacagatggggagactgaggcccaggcagagatacatggtcacagatggggaaactgaggcccaggcagagatacacgatcacagatggggagactgaggcccaggcagagatacacgatcacagatggggagactgaggcctgagcctcccagagatacacggtcacagatggggaaactgagggccaggcagagatacacggtcacagatggggagactgaggcccaggcagagatacacggtcacagatggggaaactgaggcccaggcagagatacacggtcacagatggggaaactgaggcccaggcagagatacacggtcacagatggggaaactgaggcccaggcagagatacacgatcacagatggggagactgaggcctgagcctcccagagatacacggtcacagacgccatgtgttgtggcttctgcagaatctcgatgccacagggatcaggagagaccacagaaccagcccgaggacctggcttggggcctgactccagccgctaattgtgggtgaggaaactgcggcccgtcctgggccctcaccgaggccagcagctgatgtggctcccagcagagccgcctccgcacacgcgcccctcgccctgccccacgttgtctagggcgcccgtccctgagggccacgctggaaatattccctcctccccgcgtctcccgcatgatcgctgtggctttgcccactgctgtacccacagcccctggaaggggacccggctggcaaagcacgcagcttccgttggacagacacatactcggggctcacggcaaccccgtgtccacacccatcctgccggaaggaaaactgaggtctggggaagggcaaggacttgcctgaaactcctgcctcctgctgggctcccagaacattccagaagccccagaagtatggggagtggagcaggaaaaggtcccacccatcccccacggctggcacgcaccgttctccagggtggccgtcccacaggacttcctcaggccggtctccggaatctggccctccgtcactcgccggccaaggggggctgtggccagccgtggggtggagtcgcagctgagggtccccatggtgggcaggcgatggcccccacagcacccacggggcctggtgctaccttctgagccgcagcagctctggcggccacaggcccaggcaccgtccccaccttcacggcctcaccacaccctcccacgaccacagccgcacagacggcctcttgtcccgcagcagggagtcgtggggccctggcccaaggcaggctggtcggccggacactggcctggaagtggggccgggatcgagtgtcggccaggcggctggatggtccaggaaagagtccggtgtcagcagagtgcgtctcccgggagccggcagagctgggcagctggggccagggccggccccagggaactagacctgcaaacatgacacccacagccttgcagcaggagggcctggcggggtcgtgggtggcgtggccccgtttctacacctggggaaactgaggcacagcccaaggtcatacagcaagtacacaactctgggagtttcagctctgagccaagaagcattcactgcctcatcctgtcactcattcctgccaaagcatgtactgggcacctactgtgtaccagcctctgttgggggtggtgagaactggacacgaacagacggaaaagaaggagatgttctcaggatgggagagagaaagtcgtcagtaaatgtgataagtgaacacagtctggtgtatgaggaggcactgaacgtgagggaaaacgcagacaggtttggggcccagggtagcagtgtgggtgtgggtgagccccacggagaaggtaaaactgaacagtcccaaagcaggtgaggaggcagccgtgcagaggccctggggcagcggcgaggacagcggggaggtgagagccgtcctcactgcctcccagatgcctccgagatttaaaccacaatggattttgatacattcaaggcgaccactgcgtgaggctccaagaagaggctcagaaaactgccagatgagatgcacgttcctgtctcttccttgtttgtttctgtattttttggagccttttgcagtgtaatttttttttttttttgagacagagtctcactctgtcacccagcctggagtgcgctggtgcgatctcggctcactgcaacctctgcctcccgggtttatgcgattatcctgcctcagcctcctgagtagctgagattacaggcacccgccaccacgcctgactaat[137 bp omitted]acctccgcctccagggttcaagaaattctcctgcctcagcctctcgagtagctgggattacaggcatgcaccaccacgtctagctaatttt[137 bp omitted]cctcccaaagtgccaggattacaggtgtgagccaccgcgcccagccaatttttttgtatttttagtagagatggggtttctccatgttggccaggctggtttcaaactcctgacctcaggtgatccacacacctcggcctcccaaagtgctgggattacaagcgtaagccaccgtgcctggcctgcagtgtcatctttaacagctttattgatataattcacataccatacaattatacatttcaccctgcaatgtaattttaatgtattgcatgttttaaaattttttaatcaaaatggtatagtctacataaaggatcataaaacaagtcttagtacatatcaaacttttgaaacttacagagcatattatctggtgaaaaaggaattaaaatagaaatcaccaacaatacgatatccaggatcccccaaatatatttagaagttaaacaacatacttctgaataacccacgcatcaaagaagtcatcacaaaggaagttagaaaattttcaaactaaatgactataaaaaatcaacatattaaactgtgtaggatgcagttaaagaagtacttagagggaaaatggttgctttaaatttttatatgagaaaagaaggctgggcacagcggctcacacctgtaatccctgcactttgggaagccaaggcaagcagattgcttcagctcaggagttcaagaccagcccaggcaacatggtgaaaccccatctctacaaaaaatacaaaaatcagccaggagtggtggtgtgtgcctgtaatcccagctactcaggaggctgaggtgagaggattgcttgagcctaaggaggccaaggctgcagtgagccaagattgtgccactgcactccagcctaggcctaagtttccacctaagaagctaggaaaacaagagtaagtataaggaagattgtaaagataacagtagaaatccatgaaattgaaaactgtagaaataatcccttggccgggcactgtggctcatgcctgtaatcccagcactctgggaggccgaggcgggcggatcacttgagatcaggagttcgagaccagcctggccaccatggtgaaaccccgtctctattaaaaataaaaaaattagctgggcacagtggtgcacgtctgtaatcccagccacacaggaggttgaggcaggagactcgcttgaacccgcttgaaccctggaggtggaggttgcaccactgagccaggatcacaccgctgcactccagcctgagtgacagagcgagactccacgtcaaaatcaaaaaaaagagaaaaaaagaacgcctcctccccatcccaaaaaa[137 bp omitted]tgcctcagcctcccgggtagctgggactgcagacacgcgccacgccacggcacgcaggccctgcacggcctcgtctccacctccccctgtcctctcgtcctgctccttcccctttgccgctctactctgaccatccggacctgctttccctccctcgagcccctaagacggtctccacctcggcctctgcctgagctctctctacctgagatgcctctgccagcaaaccaaccctcgctggccccttcctcggtcacgagggcccccagcccacaggccctgtcactgcccaaccttggacacaccatttgctcgtttccagaggcagcacaactccagagccacagcagggatgggtgccgaggagggagagaggaggaaaggccccaacctccctcgaccaaagctgctccttcaccaaaaccagccgaagtgcaggaccccaggggctcccacggctaaagagacagaggggacaagggcctggaaggtgttcccccaaccccatccctcctcacatccgggtcaccaggtccaggccacaccagacagccactaaaggcagacagccagagacttggttccagcccggactcggccccacctgcctccgtttccccattttacgtggggtggaaccaaaagctaacacagggaagacaggatgggaagccggccaagccgacagcatgttgctgggaggacgctgagggccggcagcctcgccagaacgagctggggcccctccagccaccagtccccttctgatctgatcgcaccagattctatcaactctgtcttcagctcagagcttgtcgcaactgccaagcaaagagcttgcaaatgagatgcaaatgaattcaacacacatgcagatgagccctgattttaatcctgcctgctcgacagaagagactaaatcacaacagtgaaaaaaagggaggctggaccggatgagaggccggaggccggccctacgtccacccgcccagctgccggctgcaggcgagggacgtcactgcccggcctgggtgtcctgggtgggaggtgactccgttggtgctcccgagacccttgttctcaccgtaattaggaactcagccagtgtttatttggggccaggccctgctcaggtgctgggaaaacgggagaggacaaaacacacaagttcctcgtcctccctttcccttggagacaggcaggcagataagtgaaacttacgtgagtgcagagggcacgtcgcgctatggaggaaacgtgggcgaagggggtgttggaggccgaaagagtgagggccgtgatcaactcagtataccactggggggctatatgagtagacagcaaactgttctcgtaaatgcagaatgttggcaaactgacaaactgcgtctgccgtgcagaagggctgctgagggccatcaccacccaggcacaaatgtttcctacgattaggcataattgaagcccgtcagtaacaatatgaacctgtgatcaattaagcagctgctcaatcgttacctcctcctctctgctcttgttacccaataaatactaagggctgtagaagctcaggaagctgcctttgctcactaggagcagggagcccttttcttcttctttttctctttttttttttttgggggggggggggatggagtttcacccttgtcgcccaggctggagtgcagtggcgccatctcagctcactgcaacctctgtctcccaggttcaagtgatcctcctgcctcagcctctcgcgtagctgggattacaggcgtgcgcaaccacgcccggctaatttttgtatttttagtagagacggggtt[144 bp omitted]gccaggctggtctcgatctcctgaccttgtgatccgcctgcctcggcctcccaaagtgctgggatgacaggcgtgagccaccatgcccggccccttcttctctctttccttctctcttcttcttccccacgttgcccttcctttaaaatagttacttttaagtttttatttctatttaaaagtttcctttgtttcttgttatcattttctacgtttgtcccttcgttcagtcttataatgacggtctcaggcagtaactgtggcggtcagccacagggtggttggtggtgtgagcgtctgcgatgtgaactgggaggtcgggagcctcgcggagaaggtcacgctccagcagagaccagaggagaagccgaactcgggaggcgggcgaggcattccaggctgacaggaactgcacgcacagaggccctggggcaggacctgcctggtgtgtaggagaaacagcgacgaggcccgtgcagctggagcagcgtgagcaaggagaagaggagccgggaggaagccgatgcggcgggtcctgcacggcctgtggactgtggggacacgggtgacgtgtgagcagggacgcgtcccaatcagagctcacaagcgccctctggtgacatctgggagagcaaaacgtgggcggtgccgggagagggcgtcacatgctgggaaggatgatgaggatggatgacaggaaggatgataggggaggatgatgggaaggatgatggggaaggatgatggtaaggatgatggagaaggatgatggggaaggatgatggggaaggatgatggggaaggatgatggagaacgatgatggagaacgatgatggagaaggaatgtgggaaggtgatggggaaggatgatgggaaggatgatggggaaggatgatggtaaggatgatggagaaggatgatggagaaggatgatggagaacgatgatggagaacgatgatggagaaggaatgtgggaaggatgatgggaaggatgatggagaacgatgatggagaacgatgatggaaaacgatgatggagaatgatgatgcagaaggaatgtaggaaggatgatggggaaggatgatggaaaggatgatgggaaggatgatggagaacgatgatggaaaacgatgatggagaacgatgatggagaaggaatgtgggaaggatgatggggaaggatgatgggaaggatgatggagaaggaatgtgggaaggatgatggggaaggatgatggagaacgatgatggaaaacgatgacggagaatgatgatggagaaggaatgtgggaaggatgatggggaaggatgatggaaaggatgatgggaaggatgatggagaacgatgatggagaacgatgatggagaaggaatgtgggaaggatgatggggaaggatgatgggaaggatgatgggaaggatgatggagaaggaatgtgggaaggatgatggggaaggatgatgagaaggatgatggggaaggatgatgggaaggatgatgggaaggatgatgggaaaagatgatgggaaagtatgatgggaaggatgatgggaaggatgatggagaacgatgatggagaaggatgatggagaaggatgatgggaaggatgatggagaacgatgatggagaaggaatgtgggaaggatgatggggaaggatgatgggaaggatgatggagaaggatgatggggaaggatgatggggaaggatgatgggaaggatgatggggaaggatgatgggaaggatgatgggaaggatgatggggaaggatgatggggaaggatgatggaggatgatggagaaggatgatgggaaggatggtgggaaggatgatggagaaggatgatgggaaggacaatgggaggatgaccgagaaggatgattggaggatgatgggaaaggataatgggaaggatgatggcaaccaagaccaactcatcttcaccaagctcatggtgtagccagaaagttgatcacccacagcagcactgcccaccagaaacagactgagaacctcctactttttttttttttttttttttgagacaatatgttgctctatcacccaggctggagagtgcagtggtgcaatcatagctcactggagcctccaacttctgggctgaagtgatcttcccacttcagcctctggagtagctaggactataggcatgtgtcaccatccctggctaatttcttttttgtgtgtggagatgggatcttgctatgttgcccaggctggtctttaactcctggcctcaagcaatccccctgccttagtctcccaaagcactgggtttacaggcatgaaccaccatgctcggccatttttaaattttctagtagttgtatcaaaaaaagagaaacacgtgaaattaattttaataatacattttattaacccccatatccaaaataatatcatttctgcatatgaacattacaggtgagatatttcacattcttcttttaatgctgtcctcccagcctggcatgttttgcactctctgcctcagtgtggagcgtccacagttccagtgctccagcgtcacctgtgacctgtggacgctgtgtcgggcagcacaggtctagagagtagagcctaggactgatcccttgggccaatggtgctcagccatgggtgttgctgcccccaggggacacttggctatgtctggagacattcttggctgccaggaccaggagtgctgatgacatctagtgactggagaactacaacgctgttcctcccaagagaagaccctcaaatgtcaatggtgtcaagatggggaaatgctgccttagtggatgggcacttattaatcgcctactgcatacagggtgagatcggcagggcgtccttggcatacagcagattactcatgcagaacggctctgctgccagctctgtgctcacaggcgccaccccacgagctgttccatgcctatcaccatggacagaggcggaggtcacaaagccagcaggagtgtggacctaggactcaagtccagaatgttcttggccctgcactgtcctgcccacctacacctgccagtctgaatgtcacccaccctggccgccatcatacgagcaccccagccccgcccctcgacgggcaccgaggctattcccacttcacctcctttacaatttcctgcagtgaacttcccaggcagacctcctgcgcccatgaaccagggtttctggattagacactgtgtggtccctgatgaatcactgcaccactgtgcatgtgtttcctcctctgaaaaacgggcatatgtcagcctgactccacagggtcactctgaagacaagggcatctggccccttatcattcaaacatcctcttccagccttccctcactccagcaaatggcacctccagacccatgctgacttggatccaaacccctggggccgcttcctggatccaaagcccactcagcagctgactgctgctctccacctcacagccacggcccagtccagggccccatccccccccaacacccacccccacctcctcagggatccctgggacgcctctcccagccccaaaaggccactctatgtcagccagagccagctcttcagacatgaccatgggaagccctacagacgcccatcctggctgccactgcgtctagcacaggctcctccccgacagacctccacctgcctgagttccctcaccactcccccaggcatgcaggctcaccctcgttccagtgacacggagctatgagatcatggtgggctgaaatcaacagaccaggggttcccaacccaggtgattgcccccaggggacgctgggcagtgtccaaggacacctgtggtcgtcacgactgggggagctcctggcatggggtgagtgggggcagggatgccgctaggcaccctgcagtggccgggaccaccccacctgggatgtccacagggcctgcggaagaccctgcagcagagagccatcagctcttcctctcatgggtccccggaagctctgggatcaatcaatccccatggggccggctctgggatcaacactgtgtccccagctccccggaagcccctgcagccatcttccttccctctacctgtcagccgccatcctgcctgtaaagccaggccccgctttgcctcttctgtgcggcacgggaaggggacggtgcactcatgagacctcccaccctgcctgtgagatcagtcctggtgtgggtgacagctgtccatcactcacttctgttgctgggcaacgttccatcccatgaagatgccatgatttactcagagcttctaggctgcttctagctcggaacaaccgcaaataatgctgtgaacacatgtctctcttgttttatttatttttttcttttcttttctttttctttttttttttttttttttgagacagagtttcactcttgtcaccaggctgcagtgcaatggcgcgatcttggctcaccacaatctctgcctcccgggctcaagcgattctgctgcctcagcctcctgagtagctgggattacaggtgtgcgccaccacgcccggctaatttttgtatttttagtagagacggggtttctccatgttggtcaggctggtctcgaactcctgacctcaggtgatccgcccgccttggcctcctaaagtgctgggattacaggcatgagccaccgcgcctggcctcttgttttatttttgacacagggtctcattctgtgctcaggctggagtgtgcagtgacgtgatcacagaaaggaaacctcagagcagagttgggtcttcacatacggtggccaggaaggccccctgaagaggtgaaacgttagcaaaggcctggaggaagtcaggacctctaagggatgcccagctgtgcagacatctacggggtgtctggggagggcaccgctgtgcaaaggccctggggcaggaccgcacctggcgaggcggaggagcgaggaggaggccagggtggctgccgcagggtgaggaggggagagcaggaggagggagggcggggctgacccagcaggtcgtgaagggccctgaggacacggagaggacacagggttttaccctgagcagggtgggagccacggaggcctctgctggagcagaggagggcacggcctgaattgggtttgaaggaatcgactgagggtaggaaggtgggggtagggaagcccgggggaggcgagcacaccagcccaggtgggcaccacggggcctgggctgggggctgctgtgggatggtcaggagtgggtgggttctgggcctgtcttgaaggcagaactcacaagattttctgagacgctgtggggtgaaggggagtgagaggaggggagggtcctggaagggcgggtgcaacctcaacccagcggaggaccctgctgacctgcttagttgtttatggagggtcattgccgtgctctaccacgtaacacacgtacacacacacacacaggtgcacgtttacaccacgtgggtgcgcacgatgaggcacacacaggcaggcgcgcacacacacgcgtgctcacataggaacacgaagaggcaggagccgggcgtgcccgagccccgtggcgccctgggcatcccaaacaccgcctgcccagaacaggtgcgcagtgagtgcctgctgagccagtgagtggaatgaagctctacaatagtccagatgacagacatgactgctgtggctgctgccgatccaagtcccaccgttcttttctctagagacaaggtctcactccaccatccaggctggcgcgatcacagctcactgacggtggagaagggtgatcagagaatggtgggaatgaggcggccctgacctcctggggttagcgatcctcccacctcagccccctaaagcaccgggagggcaggtgtgagccacggtgccagccccaagttcccgacattctttcctaaaacacatcctccggctgcagatgagggtgcgacagctgggaggcagctcccaggaggccgggttcctccgatgacctgctgtttctgtgtccctggcacacggcacagcaggagagggggaggccaggtgtttgtggctgctgccaccggcccgtccagggtcagctcatgctcccagcctccgtgatctgccactccccacttccctgaggctgctcactgctgtcctttgtccggcggccagccccctgactcagactcacgcgccctgctgctgcccgcccctttgttcccgggagactctaacaaggaaggcttgttcttcccgcaaggacacagagaacctgccagctcccctccatcctcatccagagagagcctgctgtccccgtgggacagtgaggacaggaccagctctcaggctctgctgggcacccagcccatgcctggcaagtcctcatgttacagacgaggacaccgaagctcagaggaaggaagggcttgtattccgaggatttggggggctggagaggggtcctagtgggctctgctgtagcctgcaaggtcctacaagcccaggtccttcctgccctctctggctgcgttggtccctccggactcagcctctgcactcaccgtacattctgcctgatacacccggtccaactccctccccctccaggaaggccttgctcaaatctctccacctccaggatcttccttggaccactgattgattgattgattttttgtttctgttgtttttctgagatggagtcttgctctatcacccaggctggagggtagtggcgcaatctcggctcactgcaacctccgcctggtgggttcaggcgattctcctgcctcagcctcccaagtagctgggattacaggcgcccg[224 bp omitted]gaggcagaagaatgacgtgaacccgggaggcggagcttgtagtgagccgagattgtgccagtgcactccagcctgggcgacagagcaagactccatctcaaaaaaaagaaggaaagaaatagagatggggtttcaccatgttggccaggctggtctcaaactcctgacctcaagtgatccgcccacctcagcctcccaaagtgctgggattacaggtgtgaaccgccatgcccggcctatcgggaccacagatttgatcctgcaacctgcctatcatcatgctgcctgcccccttccctgccttttccttcttcccagcagcactctccacgcctcacctattgcagcggcggctggagctgctcatgccagctcctgagcccactgtgaagttcgcggcgatctgtgagctggttggctcatgttggcagccacgatgggagtatttacaacacagggggcggcgtgcgctgcaagtgagggccttttcccttggagagccagctgttcaacatttctccgcacagcaccacttcggtattatgcccgaggtttatggcataactagcctggctcatggtctctcttccctgctgctcactagaatgtaagctccttcgggccgaggtcagcccaccttgcactctgctgtctccttggcacttaaaacaacgcttggcatacagcaggcactcaataaagatgtgctggcagggcgcatgacgtgtgcctgtggtcccaacactttggaaggccgaggcgggaggattgcttgagctcaggaggcggaggttgcagtgagtggagatcgcaccactgcgctccagcctgggccacagagtgagaccctgtgtcaaaataataacaagcatgaggcaggggggatcagctgaggtcaggagttcgagaccagcctggccaacatggtgaaactctattaagggaggagaccatccctcatattgtcttatgcccaatttctgcctccaaagaaagaagtaaaaactaaaaggcagaaatgaaatccacaggcagacagcccggcgctgtgccctgggcctggtagttaaagagcgacccctgacctactgggttacgttatctatagattccagacattgtatggaaaagcactgtgaaaacccttgtcctgttctgttccgatctgattgccggtgcatgcagcccccagtcacgtaccccctgcttgttcaatcgatcacgaccctctcacgcggaccccctgagagttgtgagccctgaagagggacaggaattgctcactcggggagctcggctcttgggacaggagtcttgccgatggccccggccgaataaaccgcttccttctctaactgggtgtctgaggagttttgtctgcggctcttcctgctacactatctctactaaaaatacaaaaaaaaaaggccgggc[171 bp omitted]gctgagg[139 bp omitted]gtccctcgcgctgctgggactgacgtccgggtacccccaacgcaaccacggcctcccggtgaccctgacccgcgaagcgggccggaagccccgcagcccctactccagaatccgcgtcccggaacctggatccccgaccgggccctgcggccccgacccccgcagcgagcccagcgccggggaacaggacccggcttcccagtctccgcccggggacaccaggctccttgggcgaacggccaggcctcccgggaccagcgcgctggaagactcgcggcggggacgccccctcggccgccccgtgccgggccccacgcaagggcagccggggcgccccgcagtgggaacgcgaggagaccgaccacggggcgagacagccgccagggcgtccgcgccgcccgccccaagcccgcatcagcccgccacgaactcggaggaccgcgggctagagcggccccgccagcgcgcaaagccttgtgggccacacgccccggcgccccgcgctccgcggcatggcgggagttgtggttcagctgcgggggccgcgcgggagctgccgggagctgtgggcggggtgggtgcgcgcgcagtggcagggccagtgagctgcacccgcggaaaaggagggggagcggctggtcagctgcgccctgcgggtcgagaatgtcatcagcagggatggcggcgctttgagtgctgagcgcggccccgaccgggaccccctacccttgacccaccctcgcaggccgagccccgactcccgacccgccgtcgcagcccgcggccccgacctctgacccgccctcgcagcccgcggccccgacctctgacccgccctcccagccagaccctctacgcccgacccgccctcgcagcccatggcccatcggcccggcagtggacgcagagcctcggccccgttccctccccggaccccccggacccgctctccgtcctccctgcagagccgagggccttggcccagccccgcatcctccccgaccgtgctcgatccagcccgggtgtgctgcacccgaaacaggctcccgggggccgtcgggcctgtgggtgaccgtgcaggccaggatctcccccttcccagtcgtgacaaccacagatggccccagatgccacgttagggttagtgcctcctgggggcgggattgcggccgggggagaaccaccctcccaacccgttaggaactgcagggacggagagcgcgctcgggatgtccagcactcagcgcgggttgggtggcgaatggagagcgagtcgtcctcagaggccgccggcctgcaggcgagaaccctcccagccaggaggctgcggctctgcctgaaccccgacccagggcgaacacccacatttggcccctgcccggtgctgagagaggccagagcggcgtccccagaagcggagcgggagccccacgtccggcggccacgatagaaagaagaaaagaaatgggtggtagtaagtaaaataaatcgtatgaaacataaaacaaggccgggcgcgttggctcacgcctgtaatcccagcactgtgggaggccgaggcaggtggatcacctgaggtcaggagtttgagaccagcctggccaacatggcaaaacctcgtctctactaaaaatacaaaaattagccgggcgtggtggcgcatgcctgtggtcccacctacttggaaggccgtcacagtagaatcacttgaacccgtgaggtggaggttgcagtgagccgagatagcaccactgtactccagcctgggcgacaagagtgaaactccagctaaaaaaaaaagaaagaaagaaacgtaaaacaaagatgtatctttatcttatttaatccactgtgtccaaaatactatcctttcgattcataagcaatacatgttgagatgctgtacactctttgttcacgctgagcgttcagagcccagtgtgtattttgcacatttgtgtccacttcctaattctcacaggaaatattcaacctgcacttcaggccactaaagttctagttggaaaagtggcttcacaaaccctagctgttgcacatgttttccaatagctgcgtccgtttctaagttgatattcgtgttagaaaggaggcttcagggccaggcgcggtggctgacacctgtaatccagcactttgggagcccaaggtgggcagatcacttgaggtggggagttcaagaccagcctgaccaacatggggaaaccccgtctctattaaaaatacaaaaattggccaggcgcggtggctcacgcctgtaatcccagcaccttgggaggccaaggcgggcggatcacctgaggtcaggcgtttgagactagcctgaccaatatggtgaaaccctgtctctactaaaaatgcaaaagttagctgggcgtggtggcaggcgcctgtagtcccagctactccggagtctgagacagaattgcttaaacctgggaggcagaggttgcagtgagctgagatcgtgccactgcactccagcctgggtgacagagtgaggctttgtctcaaaaaaaaaaaaaaagtctacaaatacaaaacttacctgagcatggtggcacgtgcctataatcccagctactcaggaggctcaggcgggagaatcgcttgaacccaggaggcggaggttgcagtgagccaagatctcaccactgcactccagcctgggcgacagagtgactccgtctcaaaaaaaaagaaggcttttaaagaaacagtttagtgccctttatggtgtttgcgacgtcgtgtaaacaccagctctctagtctcaaacccggcgagggcggttcatagacaatttcagtctctcgacgcgacgccgtgtggcttgtgcccttctagccacctagaccctcgggagaggcctgtgcggctcctggctgggcccccgtcttcaaagcagcttttgagtggccctttgacccgtgagacagggccgtggaagctggggtgagcctggagatgcccccgggagcaccaaggcgtcagagcagctgaccagggccccaggcctcgccgcttccccaggcagagccggccccaagccccgcctctcccctgggcggagccagccccaagcccccctcccctgggcggagacagccccaggccccgcctctcccctgggcggagccagccccaagccccccctcccctgggaggagacagccccaggcaccgcctctctcctgggcggagccagccccaagcccccccctcccctgggcggagacagccccaggcaccgcctctcccctgggcggagccagccccaagccccccctcccctgggaggagacagccccaggcaccgcctctcccctgggcggagccagccccaagccccccctcccctgggaggagacagccccaggcaccgcctctctcctgggcggagccagccccaagcccccccctcccctgggcggagacagccccaggcaccgcctctcccctgggcggagccagccccaagccccccctcccctgggaggagacagccccaggcaccgcctctcccctgggcggagccagccccaagccccgcctctcctctgggcggagccagccccaagcccccctcccctgggcggagccagccccaggccccgcctctccctgggcggagccagccccaagccccccctcccctgggcggagccagccccaagccggctctcaccatagtgtgcctcctgccccatggacccccatccccccagacccctcctgattagctcaggtggggctgccgtggagaccacaccagcatcatcgcctgaggctccatgtccaatttccccggggctgctggagactgagcactgccccagcccctcaccaggcggtcactgaccccagggaggcctgtcagctctgcccaggctcagcgacgtggtcagctcggccagcctgcggggagggactcgactcggacaagggtt[132 bp omitted]gcaagctccgcctctccgggttcacgccattctcctgcctcagcctcctgagtagctggaactacaggcgcccgccacca[323 bp omitted]ccatcgtgggcttcatggctacaactccacacgtacacacgcacacacgcatgcacgcacacagacgcatgcacacacacacatgcatgcacatggctacttattgaaccccctcctgcagcctccatcaatctcattcctcccccactctccttgcgaccctcaggtctggggtccttggactgggttcaagccttgtccaacaaggaggccctgccgtgatgggggtcctcactccaaagaaaaagccatgaggaccccagaactgaccagtgggtgggagacaggagagctggcccagctgggtcaagaagggtctgtcagggcctggggcgtgctccgctcctggacaacggcgccctcacagccccttcccctcagggcaacacagtcatctggaacgctccctcggcagctgtggacagggaggccaggatgtggggtctggggctggtgggatggctgggaccctccatgggaaggggggcttcctggctgggaccctccatgggaagggggcttcctgacggaggccgccgaggacaatgccgggaaggggattgatgttgggggcggggtcgagtctcccaaggacaaaaaggaggtccccgttgccggcggaagatacggtgtaggccttcctgtgggactaggactcagacccaggggtctcagggtcctccccggccctcaggctgctggcccacctcggtctctccatccctctgcctctgcctctctgtgtctctgtctctgtctccctgtgtctctctgccttctctcttcctcgctctgtctctgtctctctgtgtctctatctccctgtgtctctctgccttgtctctcttccttgatctgtctctccctctctgtgtctctgtctccctatgtctctcttcctcactctgtctctgtctctctgtgtctctgtctctctctctctgtctctgtgtctccctcacccccgccttccccacctctggccgttgaaacctgcgggtccctctgcctctgggaaccctccctcctccttcctgtgtccatcccacctgccctgtcctcagggggaccccagctttgttgtctccccgcccccacaagcctgtggatgtgagggctcggcacacggggactgtgagcagcgtgatcaccacgcgtgacccagcgggcgggcgggggacagggccctggagagctgggacacaccctgcaaggggcctcagccctcctggcgcccagtggtccctccccacctgcaggaagtagggtcgggggctgggaaacagcccattcaccaggcctgctgccccccgcccgggttaagggcccagcttcccgggaagggcctgcacctccggcctggggagggcccctcctcggagtctgctttccggtgaggcctttcccggcaccagcctgggcaggagggggatgggacccagggagacagggctgtgagctcacacacctgggccctcacctctgaggggactgtttccccaccccgggcctcagtttccctcctctaggcctcagtttctctcctttgcacccagcccctcctctaggcctcagtttccctcctcagcacccagcccctcccccgagcctcattttgcctcctctgcacccagcccctcccctaggcctcagtttccctcctttgcacccaggccctgccctggatctcagtttccctcctctggtcccagccccacccctgggcctcagtttccctcctctgatcccagcccctcctctgggcctcagtttccctcctctggtcccagccccgcccctgggcctcagtttccctcctctgatcccagcccctcctctgggcctcagttttcctcctctggtcccagccccgcccctgggcctcagtttccctcctctggtcccagccctgcccctgggcctcagtttccctcctctgacaggtaagccgattggcaatgcttggaaccccatggactggctgctgctttttattccatggccagggaaactgaggcacagacagaccctgaggtcagcaggaatgctccatcattttattcccgcgtgcctgcggtgcatggggtccagggtcacaggaccggcccctgggtggaggggagccagccatcacgactgccaccacaggccctcattgagctaggagcagagcaccctgggaaccacagcggaggagggtggggggcgagggggtgagggggtgggcagaacctgggtaaggtgaggagcagcccgggcagagtcccagaggccctgggagggtcccggtgatgcaggggggtaaacaagccaccagcggagacagaaccagtgtgcggggcttggaggaacaggtgggtggattccagtgcgtttggaagatgaggttcccaggactcgctgatggcagctgtgagtgggagtccagccagcatcccttccagatccctcttgtggaccgagatccaggtctcagtgtagaccaaggaacagaggcagcccctactcgggctcccaggctccagccaggcctgctaggtgggcggcctctgcccgtgtgatggaaggaagccaggctcagagatggggtgacttgtcccacgtcctggagggtctcacagctccaccacggccaggagacttcagtccagggggcctccatccccagcgaccttcacctgacccccaggggaccccagccaacaagacccggcctgcagctccggaacgggggagggctgctctccaccgcccctgtgcggccgcccgggaaagtgcaggcgggccgggcgcggtggctcacgcctgtgatctcagcactttgggaggccgaggtgggcggatcacctgaggtcgggagttcgaggccagcctgcccaacatggagaaaccctgtctctactaaagatacaaaattagccaggcgtggtgacgcatgcctgtaatcccagctactggagtggctgaggcaggagaatcgcttgagcccgggagacagaggttgcggtgagctgagatcgcaccattgcactccagcctgggcaacaagagcgaaactcagaaaaaaaagaaaagaaagtgcaggggacccgccgtcggggtgggggcggcgctgcccagcctctgtcccacttccatgcacttgacctcgaccctccggcctccgtctgcgatcttcccgtgcctgaatatgaggcttggaacagacccagaccttcctgcctgcccgtcctgagtggccccgggaccccgccccatctttggcccccagcccctgcctctctgccgcctccagggtcgggggtcaggccaggaaagccccttgggaagcccccggggagcagctggagcggggtcgccgggcggcgggaaggagtgggcgcctctatttaagcggcttccccgcggcctcgggacagaggggactgagcatggatttcggactggccctcctgctggcggggcttctggggctcctcctcggtgagaaggggagggggcgcgggagagaggagtgagttaggagggggctcaggagagaggagggggctcaggagaggggagggggctcaggagagaggagagggcccgggagagaggagggggcccaggagaggggagggggctcagtagagtgggggggctcaggagagaggagggacgcaggagagaggaggggcgcaggagagaggagggggctcaggagagtggagggggctcaggagagaggaggggcgcaggagagaggagggggcgcgggagagaggagggggcgcggaggggagggggcgcaggagagaggagggggcgcaggagagtggagggggcgcgggagagaggagggggcgcgggagaggggagggggctcgggggagaggaaggggcgcggtgagcggggaggggacgcgggagagaggagggagttaggagggggctcaggagaggggagggggctcagtagagtgggggggctcaggagagaggagggacgcaggagagaggaggggcgcaggggagaggagggggcgcaggagagtggagggggctcaggagagagaaggggctcaggagagagaaggggcgcaggagagaggaggggcgcggaggggagggggcgcaggagagagcagggggcgcagtaaagtgaagaggactcaggagagaggagggggcgcgggagaggggagggggtttggaagagaaggggggctcgggagaggggagggggctcgggagaggggagggggttcggaagagaaggggggcccgggagaggggagggggcccgggggagaggaaggggcgcggtgagcggggaggggacgcgggagagaggagggagttaagagggggcgcaggagagaggaggggctcggagggggcgcgggagagacgaggggtgctcagagttaaggggctccgagatagggggtgattggtgatcctgccagaggagggggctcggaggaggcaggggctgagaggggaagttgcggggctccgcgcggccccctgacccgcagcgaaactggctccaggcagctggggttcgggggactggggcagaggcggcggtcggggcggggttcagggaccgagcctgggagtccgggtagcggcggggcaggggtccgggggtgcagcggagggtccgggaaccgggcagaggcggggcggggtccgggggtggagcgggacgcagggccggtggcggggcggggtccgggactccgcggggctgagcgagagccgcggtcgccgcaggccagtccctccaggtgaagcccctgcaggtggagcccccggagccggtggtggccgtggccttgggcgcctcgcgccagctcacctgccgcctggcctgcgcggaccgcggggcctcggtgcagtggcggggcctggacaccagcctgggcgcggtgcagtcggacacgggccgcagcgtcctcaccgtgcgcaacgcctcgctgtcggcggccgggacccgcgtgtgcgtgggctcctgcgggggccgcaccttccagcacaccgtgcagctccttgtgtacggtgaggcgtccccccgcgccctgcctctctgacccttggactcccggctccttccctatgccacctcttcctggaagcctcccagattgcaggcagggtcccagctccatgcacagctccccgaagccaggtccccggccttcgcttccctccaactcaccccaactctcccagggccggccctggcccatcctcctgtctattccagcctcccagggtggggccacggggcctgcgcacaggccgtccctactgcctgttcatcagcagcccccacgcatccttggccccagctccaagcccctccgggctccggcccctccatcacgtccagccctgactctgggctcagccctcacccccgaccctccatcacagccttcccggaccagctgaccgtctccccagcagccctggtgcctggtgacccggaggtggcctgtacggcccacaaagtcacgcccgtggaccccaacgcgctctccttctccctgctcgtcgggggccaggaactggagggggcgcaagccctgggcccggaggtgcaggaggaggaggaggagccccagggggacgaggacgtgctgttcagggtgacagagcgctggcggctgccgcccctggggacccctgtcccgcccgccctctactgccaggccacgatgaggctgcctggcttggagctcagccaccgccaggccatccccggtgagtccgctgggtgccctggagacccacccgctcgccagccttgacaagcacttcgggacggggtgggggggtgggggggcagcacctgtgctgtggggcgctgggaggactggattcccccacgcagcgacagcgacattcatcgacgcaacatgtatttgccgagcacctgccccccagcacaggtcccacccctcccctgcccacagcgctccatggctcttgccttggggtcaaagcccaagtcctcccgggggcccacaggaacctgcacgacctaccctgtccccttcctgtcctccctccaccctttctccccctcctcattctgctgcagccacacgggcctcctcgcctcctcgctgttcctccaacacaccaggcgtgatcctgccccggggcctttgcacggctgtgccctctgccgggaatacccttcttccggatctttccacggctctctcctcctccccctcaggtctctgtagaatgttgcctcctccgtgaggcttccctggattcccgtttaaagggtcaacccctgatccccaacgtgtacaaacataggcacacaagcacacacatgtacaaacacagacacacacacgcgtgcacacaggcacacacgcacacgcgtgtacaaacaggcacacaagcacacacgggaacaaacgcacacacccacacgcgtgtacaaacacaggcacacaggcacacgcgtgtacaaacacgcacacgcgtgtgagccccctttcccttctgtttcgtttcttgacaccttggataacatctgacatcccccagtcccgtacattctcttttccatgaccttctcccactgtggctccccaggtgggaatcttgtgtcgcgcacggctgtgtccacagaagctagaacagggcctggggcatagcaggtgctcaataaacccttgctgaatgctcggatgaagacatttaatgtgggccggtgccctggcggtgctcccttcacgctctgtccaatcccgaagcccctgccggcttctcccactaaagaaaaagggatttgtcctcccatggggcaccctgatacccatgttaatggacgtgaggtcgtgagtttcaagcaaagggctcccggggataaagcagaagctgggagacccgggaggtctttgtggtgggggtggggctggggtgggcagagaggaggctggatttgagggatattttacagaacacgggccctcacgggcctcagtctccccatcagtcccacaggggatggagcagaaggccagggcagaaagcccccaagcaccttctctctccacgccagcctcctcccaactctcctcgtccacagcccatcataataaacgcgggacccactcgctctcagggcagcccaaagaggtgactctcacccctttgacagttgaggaaactgaggcacgtggagattaaggaggctgctggggtgatgttgccagtgagtgggggacctggaatgcccggactcccatcctgcccactgtggtgcctcagcttcctcatctgtccagtggacttccctgactgtgggtcctttgtaaatttc[134 bp omitted]catagtgaaaccccatctctattaaaaatacaaaaattagatgtggccaggtgcggtggctcatgcttgtaatcccagcactttgggaagctgaggtgggtggatcacgagattaggagatcgagactagcctgaccaacatggtgaaaccccgtcccctactaaaaatacaaatattagcctggcgtggtggtgagcgcctgtaattccagctactcaggaggctgaggcgggagaatcgcttgaacccgggaggcggaggttgcagtgagccgagatcgcaccattgcactccagcctgggcaacagaacgagactccatctcaacaacaacaacaaattctaggctttatcaactagaacagtaagccgaatagaaacaaaaatgtaggccagccatgggaggctgaggcgggaggatcacttgagtacaggagttccagaccagcttgggcaacatacgagacctcccatctctacaaaaaaatttaaaaattagctgggcgtggtattgcacacctgtggtcccagctactcaggaggctgagtggggaggatggcttcagcctgggaggttgaggctgcagtgatccatgatcacaacactgcactccagcct[142 bp omitted]agaaaccccatctctactaaaaatacaaaattagccaggtgtggtggcaagcgcctgtgatcccagctactccagaggctgaggcaggggaatcgcttgaacctgaggagcggaggttgt[135 bp omitted]gcttggaggggttctggtccaagcccttcatccagatgcggagattgaggcaggagaggcaagcctggggcagcagagaggaaaaaaaaaccctcactctgtttccagtcctgcacagcccgacctccccggagcctcccgacaccacctccccggagtctcccgacaccacctccccggagtctcccgacaccacctcccaggagcctcccgacaccacctccccggagcctcccgacaagacctccccggagcccgccccccagcagggctccacacacacccccaggagcccaggctccaccaggactcgccgccctgagatctcccaggctgggcccacgcagggagaagtgatcccaacaggctgtgagttctggtccctgggggcagggagggtgggaagggctgagagcgagaggttccttggatgaagactttagacaagaaattgccctgcccagccttggtttccccgtctgcccagcctcagtttccccgtctgcccagcctcggtttccccatctgcccagcctcggtttccccgtctttccagcctcggtttccccatctgcccagcctcagtttccttgtctgtccagtgggcttctcttaactgtgggtcctttttgtaaacatcagggactgtgtagatgtcaaggcacttggtaaattctaagccttgtagactagaagaatctttggaatagaagcagaaacaatgcggccacataggtaatttctttcctttttttttgtgagacagagtctcgctctgtcccccaggctggagtgcagtggtgcaacctcgactcattgcaacctccgcctcctgggttcaagcgattctcctgcctcagcctcctgagttgctgggattacaggcacccatcaccactcccggctaatttttgtatttttagtagagatgcggt[135 bp omitted]cccagtgccacaaagaaatagcactcaaacaaatttaattctctcagcaaggccacttttactttctgcagaaagggtgctcattgtagacggaacaatggcgagagcacagctgaacaaaggaaaagcagacatatttatccctcacacatttgggtcgcccttactgctgtgtcctgcatccactggctggagcaggatatcacactcttaaactgatacccagtttgctaacaacctaaaactttcctaagtaggtaagcgcaaaggaggacaaacaaggagaggaagttgcttacgaaagatttgaggaagcagtaacatttccaaataaggaaggggcataagctatgagctaagacttccctgggactctccagatatgcctgggtaagcccaagcaactaactgggctaaagtgtaagaactaatagctgataggaggctttagagtaagaagctattatttctagtgtctatgtctattattttatttgtaaatcaagacgagctttgaagaggaacttttctacttcctacaggtaatttcaaatttaaaagtaaaggcaaggcatgaacccgggaggtagagcttgcagtgagccgagatcgcgccactgcactccagcctggggcacagagcgagactccatctcaaaaaaaaaaatgggccggg[138 bp omitted]gcagcgggcgcctgtagtcccagctactcgggaggctgaggcaggagaatggcgtgaacctgggaggcggagcctgcagtgagccgagatcgcgccactgcactccaacctgggagacagcaagactccgtctcaaaaaaaaaaaaaaaattaaaagtaaaaataatgtggtcgggccaagcatggtagctcatgcctgtaatgccagcactttgggaggccgaggcaggaggatcacttgagcccaggaggttgaggctgcagtgagctgagatcacacctgggtgacagagcaagactcagtctcaaaaaaaaaagtgttggccagacacggtggctcatgcctataatcctagcactttgggaggccaaggaggaggatcacctgaggtcaggagttcgagaccagcctggccaacatggtgaaacctcatctctactaaaaatacaaaaattagccaggtgtggtggcatgtgcctgtaatcccagctgaggattactcgggaggctgaagcaggagaatcacttgaacccgggaggcggaagtggcagtgagctaagatcacgccattgcactccagcctgggggacagagcaagattccatttcgaaaaaaaaaaaaaagtgtggtcatacatttcgcagagcccaatatatcccaagcattatcatttcaacaggtaatcaatataaaatagtatgaaggagatatattacattcctcccttttccccagactaagtcttcaaagtgcagattgtaggctcagcacccttcatggtggtgagccgtcctctctccggtctgcccttttttttttttttttttttttttgagagacagagtctcattctgtcacccaggctggagtgcagtggtgcgatctcagcttactgcaacctccacctcccgggttcaagtgattctcctgcctcagcctcccaagtagctgggattacaggcgcctgccaccatgtccagctaactttgtatttttagtaggcacagggtttcaccatggtcaggctggtctcgaactcctgacctcgtgatccacccgctttggcctcccgaagtgctgggatttcaggcgtgagccaccccgcctggcctggactgcccatttctaaactctaaggtgctatgcgcatttcaaaagggtcatggtaaagtcctttgtgaaatttcagggaacgtggtaactttggaagcacgtgtagcctctgaggggctcctcccttcccaagcctgcagaggcctggagggctctgaccggggtctcctgcactctctccccagcgtccaaacctgcgggtgaccagctgcccgcggctctgtggaccagcagtgcggtgctgggactgctgctcctggccttgcccacctatcacctctggaaacgctgccggcacctggctgaggacgacacccacccaccagcttctctgaggcttctgccccaggtgtcggcctgggctgggttaagggggaccggccaggtcgggatcagcccctcctgagtggccagcctttccccctgtgaaagcaaaatagcttggaccccttcaagttgagaactggtcagggcaaacctgcctcccattctactcaaagtcatccctctgttcacagagatggatgcatgttctgattgcctctttggagaagctcatcagaaactcaaaagaaggccactgtttgtctcacctacccatgacctgaagcccctccctgagtggtccccacctttctggacggaaccacgtactttttacatacattgattcatgtctcacgtctccctaaaaatgcgtaagaccaagctgtgccctgaccaccctgggcccctgtcgtcaggacctcctgaggctttggcaaataaacctcctaaaatgatacaaacgtgtcagttttctcagttgacacccactccgtggagaggagaggtctgagggctccggacagcagagggttgactgtgggtcctgccctgatggctccatctccctcatcccacagtccggggctggagaagaaagtgttagaaatgcttgttccccggtgccgtaaagaaatagcacttgaatataaatgtcatttcctcagcaaggccactgttttactttctgcagaaagggtacactggccagcagttttgccacgagagtatccagaacaaaggagacagggtcatttataacctgacgcgtccaccctactgctctgtccggtttccattggctggaacgggacggtttccattggctggaacgggacctcacattctgtatttatcccgatcggctagcagcttggaacttttaaaaagaggcaaaggcagaggagaacaaaggaaggaagaagtagcttgtggaatgctaagaaaggtaaaaacaccttcaaataaggaagaggaacaggttatgacctaatgcttgcttggaccagtataagcatgccagggcagatatttagcctacattgtgggcactaagaacataaagtatgttgatttccttattacattatatatattcaatataac[331 bp omitted]cccggcctaccacaggcctttgaatacattttgcttctaagagaagttactatttattcctaattagatggggaggaaagtctcatttgaagaggaacctctacttcacgttttacaaagggcatttggtctgcccgccagagattcctgtgctgggaggatggtggaacggtcccccggcaaacagctctcattgccccctgcccggggcaacgcccctgagggacggggacggcacccagcaagctctgcccggggcggggaaacgcgagggcttagtggtttcctcggtgagaagcttaaccaggagtccccgaaagcagtgagggaagatccacagaggtcgcctggggaaacacacccagaggcggcttatggaggagactgcttgtgttttgaggtggctgcgggctgcggagggttgggagggccgggagggcggccggaagcgaggtcaggcgatgaaggcctggaggtgccagcccgggggccctggagagccatggcagagtttacagctctggaggctgcggtgtcagaaagctccctctggcggtcagggggtaacagcgcgggatgctcgcccgtgtggccgccaataggggctcagcgcagctgcagcggagctggggagggggcttctcccacgaggtgagctacgcactcagacgttgactgagttaggcggaaggccaggctgagctcgacccccagcaccaaggctcagagatgaacatgagaaaagggtctgggggccgggcgcggggctgggtccagcagtcctgggcaggtccagccccgcgcatgctccgtcaggcttctctgctaaccagggagactggttgctaggagaccatgctaatgaaggactcgctcactacccaaatggcaagcaatccggctttgtgccagaaacgaagcacttccgaggcagccattttggagtctggcaaaattcaggaccgaggccaaagccaggagagccaatcaatatacacaaagagggaggagaagagagagtgccaataaggacacaaggaaagtggtagcgtacccttgtcacttcccaaagtctcccagcgggataccggtgccctctgcccttaatcaagatggccgccttgggggggctctagcgcacagtggaatatggcggtgcttccggtcccgctgccctcagcgaagatggcggcagtggagaagcggcggcaagcggtaccaccgccggccggtttcacggacagcggccgccagtcggtatcccgggcggcgggggcggccgagagcgaggaggacttcctgcggcaggtcggcgtgacggaaatgctacgtgcggccctgctgaaggtgctggaggcgcggcccgaggagccgatcgccttcctggctcactacttcgagaacatgggcctgcgctcgcctgtaaacggcggcgccggggagcccccgggccagctcctgctgcagcagcagcgcctgggccgcgcgctatggcaccttcgcctggcccaccactcccagaggtgcgcagtgggccggcttgggcgggtggggcagcgatggacttcaactcccagcatgccgcgcgcggctccctacccgcagcgccggcgcaggggcccggggcttgctgggagttgtagtgcgcgatgccttcttgggtgggatggatcggacaaggtgggctggagggtccgggcttcggtccggcgctaggcagcgcgctgcatgcggcgcgagtccttctggccggcttcgccttctgtgatgcctttttgcaggtgctgagtttccccttgcagttcatgattttcaaaatcgtgcagctcaagaggacttggcccgaggtcgcagagccagcccccgagccaggtcctcctagtcgcctccttagcagcctcatgttatccccgtccattcagccagaacgtgaatatttacagagagcagcgcagtcacccagggcccccatcttaggggacaggctcccagcgggcaggtggggattcctggaagagcctggcgatgtgcgggcgggttgcagggaagaggcccagcaggtgcaaatttagaccccgagtgtggggcacacgggaggcgggaaagccacggaatttggctgaagcatgcgaggctgcaggtgcctacgcgcggtgtcccctggctggggccagttctgagcccagggaaggtggttggggactatctgttggcgttggggatggatgggctgatgtcttttgttggggggggggtccccagaagcggagcctgaggtaggcattgtgtgtgcaggtgattttacaagggggtgcgcccaagagaacccaggaagggggtgggaagagcaggcagggaaggatgccaagcaaaggtgccctttcagcctcataaccagggcataagcgcccaccatggcagccctcgccagagtcccagagaagttcggggggagaagagagatggggagtgtcccccctaccacgttcagggtgcacaggtgtccaagatcatactcagataagggtggcagggtgttgggtacctggacaaggagcagacttgctccggtggcccagtggctctgaaggccccgcccgatgatttgctggagccaggtgggaggggagcgggcaagggcaggcccagagggtcagtggagccgtttactgcgatggaaggcccctggtttgaagaagctgccagagccacttgcggattaagttggaggctgggaggagcctggagacaggaaggtagaaagaagcgtctgcaactgacgtggggccaggacagaagactgaactggaggggtcctgaagtcttcaggagagatgagaagagctcaggaccccactctgagggcacctagcccagagagcccaccagagagggtgagaacgtgagaccagaggtgaacggggagcaggaggaagatggcctcccaggacatccggaagagaatctcccaaggaggaaaaggggtcaacagcaggcccaccacgtatggttgttcaggttgagcactgcacaagccactcaccccgtagacactgcagatgaggatatttatatttatattaatttccgagggctgctggaacaaattacctccaacttagtggcttaaaacaacagaaatttattctctcacagttctggagggcagaagtctgaaatcggagtgtcaggaggaccacactccctctggaggctccagggaaggagccttccttgcctccccagcctccagtggcggccagcagtctttggcttgtggccacattgctgcagtctctgcctccgtcgtcacgtggcctcctgtgtgtctctgttctgtgttccctcataaggacaccactaggccccaccctactccagtgtgacctcaaccgcctacatctgcaaagctgctgtctcaaataagctctcagtctgaggttctggatgggcgtgagtttggtgggcaccagtcaccccaggacaggagtggagccattggctggaagagttctcatagcagggactcagggcaagggtggtgctggtggcagatgcatcccggccctgggctcgcctgggctccccagagacacagccagtggggaatgcagaagacaggtgcacagacctgcgtggcatctgattctgtgctcatggagccaggcctgctcccgtcctcccagcaggcagctccggccgcccctccatccttggaccgtcaggaacccctgaggtcacctgaccagtcaggaagagaagcccagagcagccgggcgcggtggctcacgcctgtcatcccagcactttgggaggcc[296 bp omitted]cccccaaaggctgaggggctgactggggctgctcctgagagcatcaccgtggtaggctgggggagaagtcaccccagatcctccctggcaccttcttttgagaaatggcaagctccggccgccagggctggtgatggcagccacagtgtccccctcctgccaccttcctggtcgtctccaaggccccctggagcacacacacagacgttacatgacttgctgaaggccacacggccaccgagggcagagctggggtcagagagccccagagtgcagccccggaggcctcctcagccaccacgttgctcatcctggcagcaagggctgcactgccccctgcaggtcactgccaggaaaacgtgcacgaaaacgaagccccagctgatctgggccagggttcccccgactcgtcctctgggggccgtcctgggtactgcagggccctgagcagcgtccctggcctccacccactccttgccaggagctccccgagtcgtgacaaccacagatgtcccagacaccgcccggcgtctgctgggggcaggagtgggaagcagaagtctaaggtgtagggtggctcctgtctctttctggagacgttccataaatagaatctttcctgtattaacaaatgctcacacgccttacaaaccgctctgtgtaggagccgacacagacggagccctggctgggctcccgctttccattttgcaatcagggaaaccaaggcccagaggccaccgtcacaggcagagctgacgttccagccccggcctcctcctccgagcccagagcttgctgccttcctcttcctcctcctccctcacccgatgattctgctgggagccgcccgggagcccaggaggggcgggtatgcggccgccttgaagtgggctgtcaccttcctgtctcctgccgtcatcatggctgtgatctcaccaggctgtaattacctctttgtgtgtcttcctgcccctcaaggcagctgtggctgagctgcagccctaattacagcccaaaataagcaggtggggcctcccacacgtatgccagctgctgtcctgagcacctggctccagccccgttctcccgtcctcacaagaacccccactccgtagatgcacaaggccaggtgcagaaaaggagagtgcacacagctgggaggggcagacgaacacccgaggcaggcctgggccaggcacagagccctgcacaccgaggggccgcgtggatgcttgcggagctggaccagggctgccgcccccagagaggagagcatttatgcagaagtggtggtggatggcgctgggtaatcccggcccacagacctgtcagtcagaagctgcgagcacgacaggaaccaacaaccccaaacctcagtggcttcaacacaagcaaaactcttctcgcttactctgcaggggacgtccagttgtttttttgttgttttttttgagatggagtctggttctgtcacccaggctggagtgcagtggcgcgatctcggctcactacaagttccgcctcctgggttgacgccattctcctgcct[213 bp omitted]tcacgcagcctgcagtgcagtggtgcaatcccagctcactgcagcctcgaccgcctgggctcaagggatcctcccacctcagcctcccaagtacccgggaccacagacgcacgtcaccacacctggctgatttttaaatttttgtagagacaggatctcactatgttgcccaggctggtttcgaactcctggactcaagcaatcctcctgcctcggcctcccaaagtgctgggctcacaggcaggagccacggcacccccacccaccccccaccaagggcttgtctgatcttgacacgcacctgcaatcatgaccacagagaagtggactgagaagtagcacgatggctcttaacattcccgctgaaagtgggccacgccccctcgcacgtttcagggggcaaagcaaggcccagaggctcaccctcggcggggtggagaagtggcgggtggagaagtggcggagggatccgcggagcagcgctgccgtcgccagccttcgagatgcccctgcaagcctcggctcccggggttcacggcctggtgccgtcccttccccctgcacagccggaacgggactgcagaagcaacggacagagtgtggcctccgaggcgggtcacgaaggacatcgtggtgtccccctccctcctgggtgggttgctggctcggctgggcagccgccatgcggtggggtcgctcgcgcagctcccagggagcacctgcagccgctgccaagagccgcgcgggttcccctgcgggggactgggccgcctcgcgtcgagccccgggggagtgtggccacggcaacctcctaagagaccccaagccagagcctcgcagcaaagccgccgccgagacgctgtgtcaatagtaaatgcttgttggttttgggcctctaggtttggggtgtgatctgtgaggcggcagcagcctgcccggcctcacagcagatcctgatgagaggggccccggtgcggctcctgctgggtcatgcggagaggtcaggcgtgatgggagctcgggccgccgcgctgacactgcgactgcccccagcgcattttggggatgacctcatggatggtaaaagcgcccagcggattataagggccaacaaatggggcctttactacttgggagggaaaaggagcgtacagccagatgggcctagagttgaattgcaggtcgctgccctcctgcctctgggcctcagtttcctcctccatagcagagctttgaccctcgagctcgctgagatggcacgtccatccctaagccctgaactgagcagcagtgatgaccagggaggcacgtgttcaccaggcacccaccgtgcaccggcccagcattactgagcacctactgtgcacccgcccagcatttactgagcacctactgcatgccggccctgcattactgaacacctactgcacaccagcccagcattactgagcacctactgcatactggccctgcattactgagtacctactgcacaccagcccagcattactgagtacctactgcacaccagcccagcattactgagtacctactgcacaccagcccagcattactgagtacctactgcacaccagccccacatttactgagcacctactgcacactggccccacatttactgagcacctattgcatcctggcccagcatttagtgagcacccactgcacacaaccccagcattactgagcacctactgtgcactagtcctgcattactgagcacctgctgcacaccaacctgccccggccccacatttactgagcacctattgcatgctggcccagcatttactgagcacccactgtacacagacccagcattactgagcacccactgcacactggccccacatttgctgagcacctactatgtaccagccctgcattcactaagcacctactgtacaccagccctgtattactgagcacccactgcacactgaccctacatttactgagcacctattgcatgctggcccagcatttacttcactcccactgcacaccgccccagcattactgagtacctaccgtgtactggccctgcattcactgagcacctactctacaccggccctgtattactgagcacccactgcacaccgaccccacgtttactaagcacctattgcttactggcccagcatttactgagcacccactgcacaccgccccagcattactgagtacctattgcacaccagccccacatttactgagcacctattgcattctggcccagcatcactgagcacctactgtgtaccagccctgcattactgagcacctgctgcacaccaaccctgcatttactgagcacctactgcatgctggcttagcacttccccggcacctaccacaggtggcccacagaaaggtgaagtcgtgtgcccaggtcatgccggagggaaggctgccctcctcaccatgaagctgagctcccagaagggaaaagcgtaagccctgaggttggccacttcctctctgggacccttggccagaccatggggctgccctgagcctcagtttccctatatgtcccagaggaagtaacaggccactagcatgaggcctggccgggaactgatggggggagtgaggccagggggttaagcagcccacccagggtcctgcagcggcccccacgctggccacggtgctccctggccactccctggtgccctccacgggagtgtgtgtcacactaccagcacacgagtggcacgtagtaaggcctcaggctcctcactggggcagggaatcgaacccaccccagagccggcagcagggctgacagccttcttctgtaaggggccagatagtgaacatttcagctttgcgtggcagcctccatcctgacattcagctctacggttctggtcggaagctgccacaggccacatgtcagcggactgatgtggttatgttccgataaagctttatttacaaaagcaggcagcaggtcgtatttgaccctcaggctgactgtggggccttgcctgtgggattgtggggagagaaataccaccactggccccgagcagcaactgtcacctgtaatcccagcagtttgggaggctgaggcaggaggatcgcttgagcccaggaggtggaggctgctgtgagccctgattgtaccactgctctccagcctgcacaacacagtgagaccctgtctcaaaaaaaaaaaaaaaagaaaaaatgc[212 bp omitted]gaggcaggagaatcgcttgaacccgggaggtggaggttgctgtgagctgagattgtgccactgcactcca[224 bp omitted]gaggcaggagaatggcgtgaacccgggaggcggagcttgcagtgagccgagatcccgccactgcactccagcccgggcgacagagcgagactccgtctcaaaaaaaaaaaaaaaaggaagaaagaaagaaagaaaagaaaaaaacaaatgtcagttgtgttaaatgttgggcacagtatttggccacatgtaaacaggcgctgctgctgcagggagggagaccagagggtcctggtgttgtgggacaaagagtggagagaccgaaaaaggttcaggagagtttatcaaggtgatcaccggctcagctggacatacatccagaaagtctgagcctcgaacaaagggcttttcctatttttaaacatcgtaaggcgggaactacgtgaggcgggaagcaagttacagaggcgagaaacaaaggcagtt[139 bp omitted]cctcagactcccgagtagctgggactacagacgtgtaccaccacgtcccgctaatttttgtatttttagtagagatggggttt[143 bp omitted]aacttatcggttttgtgaccctgcagccgtgctagggaggtaagcaggaactcgctgggcctgtaataaactgaggaatgtggagttggagagtatagataaggtccactgactacagagagaagacaggctgttaacattctcttttaacttgagtgtaagggtgggggtcacactttgcagcaactttaagaggattttaaaatttctatgactactactattaggttagagctgatttcactaattccttcttcactggggccagatgccccagacagatgcctgccgttgattcaagacatttactgagcacctactgtgggcagggcagtgttctgggcaccagggctataaccaagacgaacttccggccctggagggcaggtgctcacactggtgggagacatgaagctcacagggatgtgggacagcgagtgagacaggatgaccactaggaagaaaacaggaggaaaggagttaggggtcaggggaggcgacatttgaggagagacctggaggagaccagggaggaggtgagggagatctgggggaaggcagtgtcacggcccttgcagaggccctgaggccggtccagttggagctgggaagccagggctggatgggagctgcggggaggagaggcctgagctgggtggaggctgggaggggggaggccaggctgggtgggggctgggaggggggaggccaggctgggtgggggctggccaggctgggtgggggctgggaggatggaggccaggatgggtgggggctggaaggggggaggcccaggctggggggtgctgggaggacggaggccaggctgggtgggggctgggaggggggaggccaggatgggtgggggctgggaggagggaggccaggctgggtgggggctagaaggggggagacccaggctggggggtgctgggaggacggaggccaggctgggtgggggctgggaggggggaggccaggctggggggtgctgggaggaggaggccgaggctgggtaggggctgggacgggggaggccaggctgggtggaggcggggatgagggagacccaggttgggaggaggaggccgaggctgggggtgctggtggggaggggaggcccgggctgggcggtgctgggaggagggaggccaggctgggtgggggctgggaggaggaggcccaggctgggtagaggctgggaggagggagatccaggttgggaggaggcccaggctgggtagaggctgggaggagggagatccaggttgggaggaggccgaggctgggggtgctggtggggaggggaggcccaggctgagggggtgctgggaggaggaaggcctggctgggtgggtgctgggaggagggagccccgggctggggggtgctgggaggaaggaggccaggctgggtgggagctgggaggagggaggcccaggctgggagtgctggtggggtggggaggggaggcccaggttgagtaggggctgggaagagggaggccccggctgggtaggggctgggaggagggaggccaggctgggtgggagctgggaggaggggaggtccaggctgggtaggggctgggaggagggaggcccaggctgggagtgctggtggggtggggaggggaggcccaggttgagtaggggctgggaagagggaggcccgggctgggtaggggctgggaggagggaggcctgggcttgggatactggggggaggagaggccagggctgggagggggctgagaggaggaggcctgggctggagatgctgggggaggagaggcccaggctggggatgcttgggggagggaggcctgggctgggaggggactgggaggagggaggcctgggctggggatgctggggggaggagaggcccgggctggggatgcttgggggaggagaggcccgggctggggatgctgcggggaggagaggccctagctgggagaagggaggcgggggctcaagagaggagcttcagggatagagggtgaggaggaggggaggccggggatggggggtaggaggagaggggaggccagggctggctggggggtcggggaggctagggcataggcctggcgaggaggggaggctggggctgggtgggcgcgcggtctctgccggcccccaacgtccccgtctccgcagggccgccttcaacaacaacgtgagcgtggcctacgagtgcctgagcgccggcgggcgcaggaagaggccggggctggacgggcgcacctacagcgagctgctcaggcgcatctgccgggacggccaagcccccgaggaggtggtggcgccgctgctgcgcaaggtgcagtgccgtgaccacgaggcggtgccgctgagcgtcttccgcgcgggcacactcacctgcttcgtgctgctggagttcgtggcgcgcgccggcgcgctcttccagctgctggaggactcggccgccgccgtggccgaccgccgcgtgggccaggccgtgctggacaccctggagggcgcgctgcaggccagcgacgccgccgcgcccgcgcgcttcctggaggccggctcgcgcttggggcccgacagcctggcgctggcgctggaccgcgccgtcggggggcggcggcccagcgcgcccatgacccgcgaggagtttctggagagggccgccgcgctcttcatcgcgaaggtcaagccggtgggctgaggcccgtgggccgcgcggatccgggatctgcgctggggggtccccgcgtgcggggcgcgcggagccttcccttcgccctggtgaggccctgccataaccaggcgcccagccctgcggaggaggccggggctcccaggaagcggacgcccggtccccacacagcgccgcggccgcccctccacccccgcgggagcccctgccccacgctaataaaatgtgttgcgaggctgacgctggtgtgtatgcgagcgcccgcctcccagccccggtgcccgcagaagacgcttttccccagcaggtcacccacggccccggaaccgcggcgactggaggctggattcgaggccggaaacgccgggacccctggacccggcctggtgggagcagcggagggggacgccccacggggccctgcggagcctgaagccggagagcaggcggctcttctggaacgcagggcccgggccctccagccccgcccggcccaggtatcctccctgagcctcagtctccccagatgtcaaatgaagaggccagctgggcagatggtagtgacattggtgagacaacagccctaacacttcccaggaactgaagtgcctcatgtgattgattcccaggcccaggcagcggaggttacaccctcagcaagggctcagctgggatctgcgcccggcctgctccagaacgcagcccactcgccaccggtggggagggtcgtccggtatcccccagtgcccaccaccaccaaccagaatcacttctcagactgcaagagcgaatccagccgggcgtggtggctcacacctgtaaccccagcactttgggaggctaaggcggcggatcacttgaggtcaggagttcaagatcagcctgaccaacatggtgaaaccctgtctctactaaaaatacgaaaaaaaaaaaaagctgggctgtggtggcaggcgcctgtaatcccagctactcaggaggctgaggcaggagaataacttgaacccaggaggcagaagtggcagtgagccgagattgagccactgcactccaatctgtgcgacagagtgagaccctgtctcaaaaacaaaacaacaacaacaaaaaaaaaacaggccagacgcagtggcccacgcctgtcatcccagcactttgggaggcagaggcaggtggataacgaggtcaggagatggagaccatcctggctaacatggtgaaaccttgtctctactaaaaatacaaaaaatgagccgggcgtggtggcgggcacctgtagtcccagctactctggaggctgaggcaggagaatggcgtgcaccgaggaggcggagcttgcagtgagccgagatcgcgccactgcactccagcctgggtgacagagcgagactccgtctcaaaaaaataaaaaaataaaaagtgaatccagaactccagctccagttgctggcaggtgacttcactcccttggcctcagtgtctcctgttaaatgggagtccccacagcctgttctggtggagggggtccaatcggacatagagaacactcaagccttgtttctcccctgctgtcaccgccacatcacagtcatccacacagaaaagacttctgtgaccacatgtgggagcgttttttcccacacaccaaccagcagacgccagccgggtgtcctcttaattcagctctgacgccttctacccagagatagtgtcagatcccacaggccgagggctcagtccccgagcctctccctcttcagacaccagttgcgaatctgggcttccaggacttcggtctggccgggttcaagttggggttcccagcacccctttgggttcaattaatttgctggagcagctcactgaactcggaaacacttgtgtttcctggtttactataaaggatgtggcaaagatagcagaagaagggaccacaggtgaggtacgtgtagggtggggattggagtgccatgaggatgcacagggcaccatctcagagcttccaggcatctccacatgttcagctcttggaagctccccagaacccagttctctagggtttcgtggttttttgtttgtttgttcatttttgagacggagtcttgctctgccacccaggctggagtgcagtggcgcaatctcggctcactgcaacctccccctcctgagttcaagcgattcttctggctca[222 bp omitted]cccaggggtatagggcaggaccctctttggggagggtcccaagacccgtaatcgaaaaggtaagattagagctctgcagcccagaggagggcgggagattatttcctgaggcctaacgagctcagcagtgcagcaaaagactgcaactagggcttcaggagctatgatccgggaactgaggaagaaaactactctctattctaacaccacacacgggaacagaattttattttattttaattttttgagacagagtctcgctctatcacccaggctggagtccagtggcgtgatctcggcttactgcaagctccgcctcctgggttcacaccattcgccattctcctgcctcagcatcccgagtagctgggactacaggtgcccaccaccacgcccagctaattttttgcatttttagtagagacggggtttcaccgtgttagccagtatggtcacgatctcctgacctcatgatccgcctgcctcggcctcccaaagtggtgggatgacaggcgtgagccaccgtgcctggccttctttttttttttagacggagtctcgctctgtcacccaagctcgagtgcagtggctcaatctcgtctcactgcaacatctgcctcccaggttcaaataattctcctgtctcagcctcctgagtagctgggatcacaggcacgtgccaccgtgcctggctaatttttgtatttttagtagagatggggtttcaccatgttggtcaggctggtcttgaactcctgaccttgtaatccacacaccttagcctcccaaagtgctgagattacaggcatgagccaccgtgtctggccgggaacagaatttttaaatttttacaagttccacgatggcagagaccactcctgtctcccagtttcccagcactgagctgggcttaggataggtgatcaatgaaccaatgaatcaatacaggaatgaatcctggcaaatcgcctgtttcccaaaaaaagccacaataatggttccactccccgccgcagaggcagatggagaggtagaatccgcatccccctgcgggactggagctccttccaaggcagggcccctgcgggacgctcaccctctggactgggcaccagctgcgatgcctgcgctgacggcagctcctgctgtgcagactcaggagctgaataaatgacagttgtggttctaggctaccaaatttggggtgattcattacgcagcaatgagtaacaaagattaatgaaaggtgcccactccatccacaggtgctgttaggctaccacaaacgccccttacaggtgtgagccttacaggtcatacgccagagcatttcagtgagcacgggccgggggctcagcagcatttccggtgagcacgggccgggggctcagcatttccggtgagcacgggccgagggctcagcagcaattccggtgagcacgggccgggggctcagcatttcagtgagcacgggccgggggctcggcatttccagtgagcacgggccgggtgctccgcagcatttccggtgagcacgggccgggggctcagcagcatttccggtgagcacgggccgggggctcagcatttccggtgagcacgggccgggggctcagcagcatttccggtgagcacgggccgggggctcagcagcatttccggtgagcacgggccgggggctcagcatttccagtgagcacgggccgggggctccgcagcatttccggtgagcacgggccgggggctcagcggcatttccggtgagcacgggccgggggctcagcggcatttccggtgagcacgggccgggggctcagcggcatttccggtgagcacgggctgggggctgagcaacaggacacaaaacacaggagagccgggcgcggtg[311 bp omitted]ccgaagcccacagccaggcaggctgaggtgggcttaaatcctggacacccggacagggacgcagggcacggaggcttccaggagtgaccaatcagaggacaccaaagctggtcccagggtgcacctcacactccgccccggtcccttgaggccaaggccgaccgaagcccacctcccctgccccgcccagctccccggggcctcccctgatccctgaccctgtgccgcccactgtgcccgccctcaggtcccgaggaccccgtctgtcctaatcccggcatgacccttaccagcgcagcccggaagctgacgcgtcctccctggcctcacagcagcatagagcgcggcaatcccctctggcagcacccacaggctcctgccccaccccacagtcccccttggaagcttcctctctctccccagctcctctggtggcttcatccagggcctcccctcctcccaacagtcctctgctggctccctggggacatcccaagcctgacacatccaagacggagcttccggccggctccctggaccccgggctcctccagagtttctggtctctgtggaagcctctcacccgatccactgagcactgagaccacggccagacgccttcccgggctccacagcggccctcaccacacctcatcctgaggcaccctgcctgccctcccttcactgcccccggctggtccagccaacaccctcgcccacctggacccccagcccttcaccgcccccggctggtccagccaacaccctcgcccacctggacccccagcccttcaccacgcccccggctggtccagccaacaccctctcccacctggacccccagcccttcaccgcccccggctggtccagccaacaccctcgcccacctggacccccagcccttcaccgcccccggctggtccagccaacaccctctcccacctggacccccagcccttcaccgcccccggctggtccagccaacaccctctcccacctggacccccagcccttcaccgcccccggctggtccagccaacaccctctcccacctggacccccagcccttcaccgcgcccccggctggtccagccaacaccctctcccacctggacccccagcccttcaccgcccccggctggtccagccaacaccctcgcccaaatggactcccagtccccaccagccagtcaaagcatccctcccccagcctcagcgatgggttcagagaaacccagctggccagtgagatgcagccgggagctgtttccgggagcgcagtgctgggcggctgggttgggtgcatgggctagactttgcagccctcacctccgccatgtctgcgaataaagccggcactcaggacagctgagcgggaggctccccagcgtcttctcacctctgtcccgcactcaccacccagaccctgggcctctagccagtcgggctgtccccacctcagggcccctggacgtgctgttccctctccctgcagcactgttcccgcagacctgcctgctgcttccccacgccacctgggtctctgcttatatgtcacctcctgagtccaagatgccttcctacaccatcccggtggctctctaacccctggcattctttagaaactgcttatttatgtatttatatgctggtttgtggcctctctccctgtgaacccaagggcaagaagtttactgcttttgttcactgctcaatccccagaacctagatttacacatagaagagaaggaagagaaggagagagggaaggagggcaagggaagggaaggggaagggaatggaagggaaggggagtggaggggaggggaggggaaaggaggggaaaggaggggaaaggaggggagggggataggaagagaggggagggggatgggaagagaggggagggggaggggaagggagcagaggggaggggaggaggaggggaggggaagggaggggaagggaagagagggggagaggaagggagggaaagaaggaagcaattttcccctaggaagaagctggaagtcattgaggtgtgttaatccctgtagctgtagtaacaaatttagtgacttagcgtggacgtaccatctcacagctctggaaggcagaacttctaaaatcgaggcatgaacagggctggtccctcctgggggctccagggagaacctgtttcctcctttcccagagtccagaggcgcccgcatccctcagctccaggcccttcctcccccttcacctccaagagcgcaacctcttccagtctctgactctcggcgcccgccccccaccgccctcttaaacggaccctgtgaggacatgggcccccatcaccccggatgctctgccgtctcagggttcttatcacacctgtagagtcccttttgccacctgaggtggtacagccacagattctggggatcaggatgtggatgtcttgggggccttattccctcttccacggtgaggaactggcccgggactgcacagaggaaagctgacctggaagcctgttctgatgcatctggaagcacacgggccccacagccttttgcgtttttcccctttttttttttttagacagggtctcgctctgtggctcaggctggagtgcagtggtaaaatcacagctcactgcagcctcaaactcctgggctcaggcgatcctcctgcctcagcctcccaagtagctgggaccacaggtatgtaccatcacacctggctgcttaagaaacatttttttttttttttttttttttttttttttttttttgtggagacgaggtctggccatgttgcccaacgccccacagctgctgtgtcctggctccctgtccctctcccctgaggaccatatcctcccacatgcacccctctgccttctgagaactgtctttcttccctacaaggcatgagagcagcaagatgccatcgtgtaagagtctcagtgacatcttgggctccacaggaagacctttgtacaactatcttatctaacccactttcaaattaaaaaactgaaagtcgggctgggcgcggtggctcatgcctgtcatcccagcagtttcagaggccgaggcaggcggatcacctgaggtcaggagttcgagaccagcctggccaacatggcgaaaccccgtcactactaaaactacaaaaattagccgagtatggtggcgcacctgtaatcccagctactcgggaggctgaggcaggagaattgcttgaacccaggaggcagagattgcaatgagccaagatcgtgtcactgcactccagcctgggcaacagagtgagactctgtctcaaaataaaataataaaataaaataaaaaactgaaactcataggccaggcacggtggctcatgtctgtaatcccagcactttgggaggccaaggagggtggatcacatgaggtcaggagttccagaccagcctggccaacatggtgaaaccccatctctactaaaaatataaaaattagctggcatggtggcacaagtcacccacttgggaggctgaggcaggaggatcacttgaacccgggaagcaaaggatgcagtgagaagagatggagccactgcgctccagcctgggtgacagagcaagacgccatctcaaaaaaaaaataattaaataaataaattaattaaataaacctgagactgggtttaatgtttgagcgatatttccaaggtcgtggcagaaactagatttgaatttaaggttcttctctgccatgtgatggaaaacctaactcaaactggcttaattaacgaagaaggaatttatttttacttatttatttatttttgagatggagtttcactcttgttgcccaggctggagtgcaatggcgtgatcttgactcaccacaacctccgcctcccaggttcaagcgattcttgggcctcaccctcccgagcagctggaattataggcatgtgccaccacgcccggctaattttgtatttttagtagagacagggtttct[131 bp omitted]gtgtgcacgtgtggtcccagctacctgggaggctgaggtgggaggactgtttgagcccaggagttcaaggccagcctgagcaacaggaacgggggcagggagggaggaaaggaaaataaactaaaaaggctgggcgtggtggctcacgcctgtaattccagtactttaagaggccaaggcaggaggatcacttgaggctgagagatcgagaccagcctggccaacatggtaaaaccccatctctactaaaaattcaaaaattagctgggtgtgacagtgcacgcttgtgatcctagctacttcggagacaggtgggaggattgcttaagcctgggaggcagaggttgcaatgagctgagattgcgccactggactccagcttgggtgacacagagagactccatctcaacacaaacgaactaagaggcaagaattcatgagcttgcatcattggaacatccaggggaggtcaggtaacagcatgatgcaggatcactaataggattatcaacgtttcccctctcatcagccggctcggctttcctgtgatgccgcctttgttcggaggccccgtggtgacaccatgaccccgtaactccagccccaggtccttccagctcagccaccccagcactgtgatcccagagaaatgtcccagagctgaatctcattggacgtcaggagtcacatgcttgttcctgaaccaatcattgcagcccagggtgggggccctgggaactgatgggatggcccctccctgcagccagggcttgcgtcagtccaattcgaacccgttcccacagagtagggagcccccaagcaggcaggtggaagcccctggtgtccaccgctcccgggtgctgtgagcctgagcctccctgggggtcggggccctgtgggaccagctggaggggcttgaaaatctccccaacccaggccgggcgcggtggctcacgcctgtaatcccaacactttgggaggccgaggcgggcggatcacgaagtcaggagatcaagaccatcctggctaacacggtgaaaccgcttctctactaaaaatacaaaaaattagcagggcgtggtggcatgcgtctgtagtcccagctactcaggaggctgaggcaggagaatcacttgaacccgggaggtggaggttgcagggagccaagatcgtgccactgcactccagcctgggcgacagagcaagactccttctcaaaaaaaaaaaaaaaaaaaaaaagcgagagaaagaaaacctccctcacccacacagtgcttcctgggatgtgggtgtacggaagaagagagatcttgggagcccttagagaaggaatcgtggttaattctaattagcattaatttacccatgagctgctgcctgccggctccatgatgctggcaatatatccacgacctgtggcacggaagagactgaggctcacaaaaccctgggaaccttggtgaaggggccacagccagaaggccccactagtcccgagaccctccttttactccaggcccccagggtgccgggcagaggggcctgagggaggaggcccagaggcccttacgggtgaggacgcctcggcctcggccctggacagctctggaagtgaccgctcggcccagagctctttcttggatccctccctccctctccactcctgatgctgttttcctttccccagacaggtttgcctgctggtcctcttccggggaccagactcatgaagccggggccaggtgttggggcacctgcgggacagagtggccctggtcccagactggtttttgtttttggttttttttttttttgagacggagtctctgtcgcccaggctggagcgcagtggcgctatctagactcactgcaagctccgcctcccgggctcacgccattctcctgcctc[135 bp omitted]gccccccaaagtgttgggatcacaggcgtgagccaccgtgcccggcctgtatgttgatgcagctgtgtgtacccagggcatagcaacaatgccactggcacagtccgagggcagggccacccgtcacgggcacgactcaggggaggctgggctgccccgtcctcaccacggccagttctcccgaccaagcttcacagcaaggagcatgtgggtgtctgggcagccactgagccaggtcagaagtcaggtggggtcacagtgatgcccggaatcagctggggtcaagactcaggtgggctgggcgcggtggctcatgcctataatcccagcatttgggaggccgacgcagacggatccctttattagtccaaactgcatcctccccttcctttcaaaacctaacaacacacttgaggtcaggggttcgagaccagcctggccaacatggtgaaaccccatctctacttaaaatacaaaattagccggacgtggtggcgggcacctgtaatctcagctactcgggaggctgaggcggacactagcttgaacccgggaggcggaggttgcagtgagattgtgccactgcactccagcctgggccacagaacgagactctgtctcatttaaaaaaaaaaaaaaaaaaaagactcgggtaggacaaaggtcaggctgggaggagggcacagccaggctcgggctcagcttggggtgggggctccgtggggctggcgcctctcccgggtcaggtgctgagccgatgctggccggcgtaggcctctttcccagtttctctggggggcaggagcaccttgccaacctctgatggctccagcgcctgcactcgcctcacaccacatggtgacttcaacggggaccagggaagccctcgcccctcccacccctcagagccctccccgacctcgcccacttctcagagctcccgctgtcgggggaaccgaggcagcgccgcgcctggaagccaggtctgcggatcccgcctcgctcccgccccttcctcccttccgcgtggccagcgcgaccctaggacagacttcgcgcccgtcccctgcacagacggggaaacggagacggggacgcggggtcgcgccggatggaccggccctgcccctccggtcccggtcaggaccccgcgccgcgccccgttcaccgcccgcggccccgccccgcgccggcacgtcacaaaacaaccccaaagccgggggaccgggccggtgacggcgcagagcagccctgcccgcctccttgcgcacagcgtccgcggtgctggtcgagcagggggcgacggcggcggcctcggggatcggaagagcccggggctgcgcgctcgaaccctccctcccggcggaggcgctcggcgccgtaggcgggaccggggccgggactccacctcccggcgtcccctgcggccgggcgcgcaggcgcaagtcggacctggccgcggagcgcaggcgcagtcggggccaggcggtgcgcgcaggcgcagcggggggcggggcgcgcgggcccggccaaggcaagcgccggtggggcggcggcgccagagctgctggagcgctcggggtccccgggcggcggcggcggcgcagaggaggaggcaggcggcggccccggtggctcccccccggacggtgcgcggcccggcccgtctcgcgaactcgcggtggtcgcgcggccccgcgctgctccgaccccgggcccctccgccgccgccatggctcggccgctagtgcccagctcgcagaaggcgctgctgctggagctcaaggggctgcaggaagagccggtcgagggattccgcgtgacactggtggacgagggcgatctatacaactgggaggtggccatcttcgggccccccaacacctactacgagggcggctacttcaaggtgagcgcggcgacccccgcccgggtcccggagcccacgagcgacctcgggcgccgggaaccagctccctgccccgcggtcctagcgctgttgctgggcgggccccgaagcctcctggcttgggctcgtttcccttctatggccacgttcccccacccagctctgcccggccccctcctcggaccgtctcggggaccttcagcctctgctgcagtcctcgaaaatccccagttcccttcaaggcatcgtccggtcccctgttaggctcttggcccccggaggggtggccgggggccctccctgtagcatctgggcgtggggctcttgcccacctcctccttggcgggggctggaccccggctgcctccccctccgcccctgcgagaaagagggagcggagcccaggccgcgccggcctttcagctgccctccccgccctccccggaggagacaaagaggcccccccagaccccgtagctgctattgttggggagctgggcccgtgagcgggggagcgaggccagcctgggggtggctggcgcggccactcgctcagtctccaacaaaggcccggatgagccttggcagccaggacccgcctggaaagcggccacccttgccagtagcagccggccaggcgccctgggctccatcccctgctttatgtaacctgcgccctcgggaaggccgaagtaggggcgtgcctcccacctgctccctgcagctctctccaggcctcccggctcgggcccgcgtcccggaccccgacctcagaagctccgggctcgctcatcccagctggtcttggcctttctcagagtccactgaacaggtggcttcttgggacccaaaccccgagttctgggccgtttcttctgccctctggcggtttaattccaagcagtttctggatgtttttgttgttgttgggagcggggaggctgtttctgtctcatgtgaaaaggactcaggccaaaaccagggcagttttcttgatctcacgatccagacgtgacctttgacttcttttagcgttcagggacctcgttcttggggccagagggacaaagcgaggggccctgtgtgagcggtggggaacgagcaccctgtccaggaatctccccctcccaccgtcacttcctgccaagagcctggacacgacacgacactgcagggcccggcccgctctgccccggccagctgcgggcgtggggccgagggaccgatgcctcccgcacgatatgtgtctgctctccgagctaattagtgtctgaaccgcacccgctcagcggctgtgagggcagcagcctggtctgctgggggcgattcctgagcagagagtgggacgcccgtgggttctgcatctggaatcctgcgtccccacacagggaacagagtttgggtctcgaggttgccaaatggttttagcagctcctccgccagccccttctgtctgcttgggggagcagctggctgaggagccgcagccccacctcgaagccaggcctgtgaggcggctgctgttctggaaggaggggatgggggtttctggctgctgtgcccaccagaccggttgccagggattgtgggcagagcttcctgggccagcattaggggataatccggttttccggatttcccagggagggggcctctagacatctgccacagggtcagtcctcagaagccagtgttgagacgggggtgctgccacccacgaggactctcccttcccgctgtgcctgggagggagttgggggagcgtggaaatacagaacctgctgagtgcccagggccgctgctgcccagccactgcctgcagctgctgttccttcaggagccaaagtgagccctggggcaggggccgccagagagagccctccacagccgacttgctgtctgcccttggcagggcgctttccttttctgagcctgggtttgctccggggaaaagacattcttagaggtgcccaaaataagaggctcattgggacttggtggggtttggtacagatgaggccttggctgttgtcaaggattgccgcctgaaacccagcaccaggcttggggggcctgaagtcttggggaaccgcaggacagttctgagactgaagttccagccttgctctgtggccgcggccaagtcacttgccttacggggcaccagtgagttccctgtcaaacagaggacaccccccaagacaccccgcgtgccctccctgtccaggaggggcccgtccacgatccaagacccccaaagtgccctgcctgtccgggaggggcctcgcccacaatccaagacccccgagtaccctccctgtccagacctcgcccacgatccaagaccccctgagtgccctccctgtccagacctcacccacgatccaagaccccctgagtgccctccctgtccagacctcgcccacaatccaagacccccgagtaccctccctgtcaaggcctcgcccacgatccaagacccccgagtgcccgccctgtccagacctcgcccacgatccaagacccccgagtgccctccctgtccagacctcgcccacgatccaagacccccgagtgccctccctgtccagacctcgcccacgatccaagacccccgagtgccctccctgtccagacctcgcccacgatccaagacccccgagtgccctccctgtccagacctcgcccatgatccaagacccccgagtgccctccctgtccagacctcgcccacgatccaagaccccctgagtgccctccctgtccagacctcgcccacgatccaagaccccctgagtgccctccctgtccaggcttccaccacgatcgctctgggggtgctgctctcgtgccttggagtgctgagtgccaccaggacccctgacccagacaacctctgtgtctggcactggggcccagcaggaaaacagtgaggcttccttgtttacctgctgtggcccaggagggccgtgggtggcatcacgccccaggctgcaggccagacagctctgtcacctggcacgtggcttcaggcctccctctgtggccgtccttgccagcagatctggacctccagggcctgggtgaccacagggggcgatgctgacagggaaggagtcctgccaggtttctgtgacctatgggtctgcctgcctgaccccccaagaccggacacctgagggcagacggccatactgactcatcccctcccacggcctgggccagggcaggtgtcacaagtgtttgctaactgagcaatcatctgtgctaaccctccccacaccctggctgccaaggccctggaggtgcagccctggtcctgggcttcagctccatccaaggggagcctggagcccctgccagtccattctgtctgctggtgggtgcccctggcctgggtcccatatgcctgacctgggctgccacgggcctggagccacgcgggcagccagtgcccacgttccccagcagttgtgctgggccgggtcccggccacctggactgtgtaggagctgggatcagctcgggtgactcagaaaaggcttcaggcagccttctggggacttgaccccaggcctgtgagagtccctgccttgggcaggatacggtgtccctcacacacaccctcaggcaccagcactgggagtgggatggccttgggcaccttgtgagctggggcaggtcttggggctgggctggactgagccacctgccttctgcccctgcaggcgcgcctcaagttccccatcgactacccatactctccaccagcctttcggttcctgaccaagatgtggcaccctaacatctacgaggtgagcgcggcccccacgggcctcaagtcctcatcctccgggacccagggtgctgggagcctcacgtcctcatccttccgggacccggggcgctgggagcctcacgtcctcgtcctccgggacccggggcgctgggagcctcacgtcctcgtccttccgggacccgaggcgctgggagcctcatgtcctcgtccttccgggacccggggcgctgggagcctcacgtcctcgtcctccacgtcctcatcctccgggacctggggcactgggagcccgtgctgacctctgacctgttctgacctgtcttcttcttgtgcagacgggggacgtgtgtatctccatcctccacccgccggtggacgacccccagagcggggagctgccctcagagaggtggaaccccacgcagaacgtcaggtaagccggcccaaccccctgtgtccacccagaacatcaggtaggccgggctccgtcccgtatccacccagaccatcaggtaggccgggctcccccacaggctgtggcgccaaggcctgattcgggacctgccagctggcggtcctgggcctcgctgtacctgcacggtaggtgctttcacggggcctgcggcaccgtgtgtcggtgcagactcccaccaggaccccaggccggccccaccgtctggaaccacctagaggtgtcccgccatcctcagtcctggggccttctccttacccagccgtctctgggttggtcacctcgtgccacgtgtgccgcctgggcctcgtccccaggtacaagcactgggccgtgttgcccgtgtgtcctggagtgtagtctaggcaggacgtgcgggtgtgagggcagccccgggtctgacggaggggtctgcaccttgctgccctccctggtcttggcgtgggagggaggagactgatgcaggtccagcccctgctgttctgggggcctgagacagaagcagaggccatgaggccaggtgaaggtcacctgctgggtgggtccaggcgtccccgtgaccctcagggccagagaagagccggaaggctggggtgccccgggccgccccactccgacccactctccccacaggaccattctcctgagtgtgatctccctcctgaacgagcccaacaccttctcgcccgcaaacgtggacgcctccgtgatgtacaggaagtggaaagagagcaaggggaaggatcgggagtacacagacatcatccggtgagggcgggcgggggcgtcacgggaggagagactcagatccggcctgcaccccggcccctggtcccacggccgcccagccccaccttcctggtgagggtggcggagcttcctggtgcccatttacagggtgccagtcacagatggaggccgggccgagtggcggagggtccagccaggttcaagcccagcttcttgccccttttcctctttttttttgtttgagacagagtctctctctgtcacccaggctggagtgcagtggcgcgatctcggctcactgcaagctccgcctcccgggttcacgccattctcctgcctc[176 bp omitted]ccggcctttttttttttttttttttttggagacagagttatactctcttgcctaggctgcagtgcagtggtgcgatctcggctcactgcagcctccactactcgggttggagcagttctcccccttcatcctgccaagcagctgggattacaggtgcccactaccacgccgagctaatttttgtaatttttagtaga[137 bp omitted]tcttccaggcttttcagtttaacgcatgtctgtgctttaatgaagaaatggggtcgtgctgtgtgtgcccagtgactgactgttagggaacatgtgtctgtgccttaatgaagaaatggggtcgtgctgtgtgtgcccagtgactgactgttagggaacatgtgtctgtgctttaatgaaaaaatggggtcgtgctgtgtgtgcccagtgactgactgttagtcaggggtgttggccttactcatgtctggagtgcgtccctgcaggctcttggcctggtgagctctgggtacagctgtgcagtcgcctaccggcgccttctgtacctgcagtccacttagcttgcgtggctgtgtgtggtgacccacggctctccctctcctcccatcgccctcatgccccagagctgagccccacagccccttctcttgggtgcctgtgttcacatgaatgtgtaaacacgtgcgtgtctgtgtacaaagacaaggctttctttacgggttgacggccttaatggttcctgctcttcctgttacatagaggcccttcctatccattttttttttttctcagagtgatattgcatagatttcctcacagaggcctcacctatttttgttggtattttgtataaacagaatcttaaaaacaacttttaaaatattgcacacataatgcatgtgtcttcctcgccccaggacccaggagcatccagggcaccttccatcctgcactcgctggtacctggtgtcgtggggtcatctcggggcagcatcctggtgctgggcggtctcggctctgagcagccatggtgggcgggccccgtgcggcctcctgggaagtggcctgcaagcacctgctggcctctggaggtcacagggtagctgccctggccgtccctctggtgcagatgtcctcggtggccccggtccggtcgtgtcacctggcccaggtggctggctccttggcccggttcttcccggccacctccctgaggcaccacctccttgagatcccagcacagaaataaaagccacactatttttatccctcaaaactccctgtgggccaacacacatgtgccatgtggactctgctgtggtcgccgtttctgcctgttttttcatctgtgtgcgtgttggcctcgtggcagcccaagtcccgctgagctgtgtcgggcaggctgccgtggagcccggcttggtcagggatgttggtcttgctgaacaggacctccagaccgtcctccagctcatgctggcggtgtgccggcggcacctccacggtgcaggtcagttcccaccctggccctcccctgcgtctccccacagccgccacctctgcggtgccgtccccggggcaccgtcacccccccagcccgtccaccctggccctcccctgcgtctccccactgctgccacccgtgcagtgccgtccccggggcactgtcagtcacccccccagcccatcggagagcttggaaagcaaagcttggcgtccgctgggtcccgccacccagggacgtccctgaggccagacgcctgccctccacgcgtcatgcatccccataaaaagcactgggcttgtgggctgggcttggggctgtctgtctgctccctggtgccctcccatgcgggcactgtgggacccgcacaccctggtagcagccagccccagagcccagagccgtgcctggtcggtgataggggctcgagcccattgcctgcggctgcagcctcgttcctgttttctgtcaaatggggtcagcgtgccgcctggccctgctgtgccacccccggaagcccctttgcttccagtcctggggggacattcttgacgcgtgtcctggaggtggagccgggggcaggttcctcgtaggtcctggtgtgcgcggtgcagcccctcatagggccgggtgtacacggtgccctccaggaagtttgagctaacttgtcctcccttcctgccagaggctgggatggccaggccccccaggtttagaatccggaggccggggtggccaggcccccaggtttagaatccggaggccggggtggccaggccccccacgtttagaatccggaggccggggtggccaggccccccaggtttagaatccggaggccggggtggccaggccccccacgtttagaatccggaggccggggtggccaggccccccgggtttagaatccggaggccggggtggccaggccccccgggtttagaatccggaggccggggtggccaggccccccgggtttagaatccggaggccggggtggccaggccccccggtttagaatccggaggccggggtggccaggccccccgggtttagaatccggaggccggggtggccaggccccccgggtttagaatccggaggccggggtggccaggccccccgggtttagaatccggaggccggggtggccaggccccccgggtttagaatccggaggccggggtggccaggccccccgggtttagaatccggaggccggggtggccaggccccccgggtttagaatccggaggccggggtggccaggccccccgggtttagaatccggaggccggggtggccaggccccccgggtttagaatccggaggccggggtggccaggccccccgggtttagaatccggaggccggggtggccaggccccccgggtttagaatccggaggccggggtggccaggccccccacgtttagaatccggaggccggggtggccaggcccccgggtttagaatccggaggctgggatggccaggcccccgggtttagaatccagaggctgggatggccaggccccccggtttagaatccggaggccggggtggccaggcccccgggtttagaatcctgctgaggccacggagaggctcaggccgtttttgcgtttcccatctcacctgtgctggttcccgtctccagggatggtcctgcctcctgtccttgggccctcccagctgcttcctttgctcctgcgctgaggaaggcttttgccccccagtggggcagcatgggccctccctgttgccggcatcgttattttctcccagctcctgatgggtcccttgggttgtgcttcggggcggggcaggcgggtgtgactgcactgcgcccgtccagcctcccacccgcacctcctgcccttcccgagccccctcctctgtcatttctccccctggagttcctcacgcacagggctttgtcctaagtggtcgccacacgccgttttaagagaaacctgagcgttggggtgagcgtcggacctgggggaggggggccgggcaggggccgagtccaggcacgtgggtggcgccctcacccaccctgtccccccaggaagcaggtcctggggaccaaggtggacgcggagcgtgacggcgtgaaggtgcccaccacgctggccgagtactgcgtgaagaccaaggcgccggcgcccgacgagggctcagacctcttctacgacgactactacgaggacggcgaggtggaggaggaggccgacagctgcttcggggacgatgaggatgactctggcacggaggagtcctgacaccaccagaataaacttgccgagtttacctcactagggccggacccgtggctccttagacgacagactacctcacggaggttttgtgctggtccccgtctcctctggttgtttcgttttggctttttctccctccccatgtctgttctgggttttcacgtgcttcagagaagaggggctgccccaccgccactcacgtcactcggggctcggtggacgggcccagggtgggagcggccggcccacctgtcccctcgggaggggagctgagcccgacttctaccggggtcccccagcttccggactggccgcaccccggaggagccacgggggcgctgctgggaacgtgggcggggggccgtttcctgacactaccagcctgggaggcccaggtgtagcggtccgaggggcccggtcctgcctgtcagctccaggtcctggagccacgtccagcacagagtggacggattcaccgtggccgactcttttccctgctttggtttgtttgaaatctaaataaaactactttatgagaggccagagaagctgtgcttgggagggagaggcagcctccacgtccatgagtgactgcacacggccagtcccactgggaccctggctacgccaggtgtggatctgggaggcctgtcctgggaggcacggggagcagccgggtcccgcggcctgtacgttcccatgacttgggtcagacaggcctgggcagcatcccccagcctgcgggacaggggcggccagaaagcccccagagttcctcctccctgtgaccaggtgcatctagtgggacgggagctgcctctgcaggcatccagcaaagcttcgtcgcgggtccacagccgcctgggcgttgatctcagcgtctcagggctcccaggaccacagatgcccccgatcagcactccggcggctccagctccgtccaggcacaccctcggggtggggagccgtggccctgggcacacagggcaggcacctcacgtcctggtgtcaggaagtccccagcatcgttttattacatgtcatggaggaaagctcggagctcccatgccctcccggggcaccgccttccaggaacctgcctgcgttccgcttctgggcacccggaaagtcgctcagtggctgattcagggtcgaggagctgtgaggatgaggtttcccaccaagttgggacagaaaatggggccctggggtctcagcaaaccatggccctcgggaccaaacctggcgtccgcccctattgtgagtgaagtgttactggcacagccacacccaggtctcaggatcatccatagctgcttggtttggtttggttttgtttttgagacacagtcttgtgttgcccaggctggagtgcagtggtgcgatctcgcctcctgggttcaagtgattctcctgcctcagcctcctgagtagctgggactacaggctcccaccaccatgcccagctgatttttgtatttttagtagagatgggg[143 bp omitted]cacccaggctgaagagcagtggtgcaattacggctcactgcagccccaacctgggctcaagcgatcctcctgccccagtctctcaaagtgctgggattacaggtgtgagccaccgccttcggccagtgtctttattcatgaagaccaaaaactagaacagcgcaaatatccgtccgctggtgaatgcataaacacagcgtggtccagccacacaatgggatgtgacacagccacaaaaaggagcgaggctctgacacaggccacagcctggatgcaccttgaggacgtcatgctgggagagacgccaacgcaacaggtcctgtgtgattccactcctgggaggtccctagagaccaattcagaggcaggaagtagtggccgggcgcggtggctcatgcctgtaatcccagcactgggaggccgaggtgggtggatcacctgaggtcgggagtttgagaccagcctggtcaacatggtgaaacctcgtctctactaagaatacgaaaattagccgggcgtggtggtgggcacctgtagtcccactactcgggaggctgaggccggagta[131 bp omitted]gatggtagtgtggcttcatctcgagtcctctttgagaaacactttctaaaatgctcaaggatggagggtggagggtgtgcagcggtgggcggggctgtgaccgtcacctcacctcccccacaggaagcgcgtgtggggaggctcggggccggggccagcacccacactgggtctccacagcggcatggaggcctgcgtgtcttcactgctggtgctggccctgggggccctgtcagtaggtgagtgggagccgggatgcaggggggacactgaggcccagcgctctcggtgggtccctggatgggaggggtgggcgcgggcgccgacatcctgggtgtaagagcggagattcatccttgtttggagggggactgaggcctggggcatcccgagctcctcacgcttcaccccgagtggacatcccgggaccgtgggagagtgtggtgtccaccggctcacctcgcccatcctcccggcagcagccagaaggcaggggtcacgctcacacccgaggtgcagagtaggagactgagacttggcgaaggagatgctgacctaggactgcccagctgggagggcagagctgggactcgatccccgctggctgcctgccaccaccaagggcttggctgggactaggtgcccagcagtgagggagaagggaggtgggtggcggctcccctgcattccagctggactgagtgacaggggctcttgatgagttggggacccaagaagatggacagaggtaggaatccagccgtcagtcatcatcatccttcctcccatttttatttccttccacccatgggtccatcatccctccctccctccctccctccctccctcatctccccttccttccctctacccgtccgtccacccatcattcctccttccattcttccacccacccatccatcatccatccctctacccatgggtccatcatccatccctccctccctcctttcgttcccccttccttccctccgccagtccatccacccatcattcctccttcctcccattcttccacccacccgtccatccatcatccatccctcctttcaacctccctccttccctccacccgtcatccttccctccctccttccatgtatccacccatccatccatcatgcctctctcttcctttcccccctccttccctcctccctcccatccatccatcatccattcctccttccatccctccttcctttctcccgtgcttctgtgtatccatccgtatttgcagggctcgtgctgttctaggcctgccctcctgtctgactggaagagacaggccaggcatgagactgtgcagagcggaggaaacacggagggcaagagggcgggtggggggccgttgcaggagacgagcataaaccaagggaggaagccggtgggggaaaggtacgcaggcagctaagtgagacagacaaaggcccagggtgcaggcagcttgcaggcacagctagacttgcactcttgtcacccaggctggagtgcgatggtgccatctcggctcactgcagcctccgcctcctggtttcaagcgattctcctgcctcagcctcccgagtagctgggattacaggcgcctgccaccatgccgggctaattttgtatttttagtagagacagggtttccccgtgttggtcaggctggtctcaaactcccaacctcaggtgatccgcctgcctcggcctcccaaagcgctgggattacaggcgtgagccaccgcgcccggcctattttttttttttaagatggagttctgctattcttgcccaggctggagtgcaatggcacgatctcggctcaccacaacctctgcctcccgggttcaagcgattctcctgtctc[227 bp omitted]caggctgatctccaactcctgacctcaggctgtctgcccaccttgacctcccaaagtgctgggattataggcgtgagccactgcaccggcccgcaagcggggacttgattttcaaagcatgatggggattcagagaagattttgagctgatttacgttacattatgaaatcaatccttttatatttatgattgatttaaaataatttttgtacagctttattaggaaattatgcactatacaatttacttatttaaagactacatttcttgctgggcacagtggctcacgcctgtcatcccagcactttgggaggccaaggagggtggatcacctgaggttaggtgtttgaggccagcctggccaacacggcgaaaccctgtcgctactaaaaatacaaaaaaattagccggacgtggtgatgcgcttctgtaatcccagctactcgggaggctgaggcaggagaatcgcttgaacccaggaggcagaggttgcagtgagctgagatcacggcactgcattccaggctgggtaacagagtgagactccatctcaaaaaaaaaaaaaaaatggccaggtgcagtggctcatacctgtaatcccagcactttgggaggctgagatgggtggatcacaaggtcaggagttcgagaccagcctggctaacatggtgaaaccccatctgtactaaaaatacaaaaattatccaggcgtggtggcaggtgcctgtagtcccagctactcgggagactgagtcaggagaatggcatgaacccaggaggcggagcttgcagtgagccgagatcgtgccattgcactccagcctgggtgacagagcgagactctgtctcaaaaaaaaagaaaaaaaaagttttttttaagagactgggtcttgctgtgtcgcccaggctggtctcgaactcctggcctcaagtgatcctccctcctcagcctcccgaagtgctgggatcacaggggtgagccacccacatccggcctgatgtgcgttttgaaggactcctgtggctgtggggcccagtggggcctggggaggtcctggagaggggattgggaggtggcctggggggaacatgatgggggtgatgagagggggatgggagggatgaagggcagcccacacgtatcagcctaaaagtttcggggaacactggggacttcattaggatggcacatctgcttggggtcctgggcctctgagctgggcaaggacagtcgcagcaggcagcaggggcatgtagccccaacctggctctttgtcccccatcctggcaggcagctcctttgggacccagatcatcgggggccgggaggtgatcccccactcgcgcccgtacatggcctcactgcagagaaatggctcccacctgtgcgggggtgtcctggtgcacccaaagtgggtgctgacggctgcccactgcctggcccagcggtgagtaccctgccctgcccaccccaggggtccggggaatccatccgacggcgcccattctctgcagggggtgggctctgggagatttaggcccattgtgggacccccgtcccctcccggtgacgacttaggcaggtttaagtgacctgcggctgtgggactcctggagaaggtttactccttgcaagaggcactggcagggccagctccttccacaccgcagcctgggtcagagcctggctcctttcacggctgagccacagtcctggtgtggacagagtgcattgtgtctgtccattcacctgctgatggacccaacttaggcgggggcttctgctataaggaaggagggtcaggtgggggtgtttgccacctgtggccaggaggtcgaagccggccttcgagagtggctcgggaatcgacctggttcccggggatcaggaagccgctaaatgacccatcatggagttgccctacctcaggactggtccgtcatacagagcccagatcaagatggtcaaagtaacaaaaagggatctgccggcttgtgtaactgcaaagtctaggaggaggcctggcttcaggtgcggcttgatccaggtgctcacaggaggcgctgtggagcccatctgtctcccagctctgctgcactaccaggaagcctgtctcacaaggtggaaagattgaccctcctcagtcccatggaaagagggcttggctctctaaagttggggcacacttaggaggattggcatgtgtcaacccctgtacaaatcactgtggttgagcctggggccccaagtgaagggaattcccagggctggttttcgtgaagctgtaggcttggggttggatttttggacacacagcccttgcctggggccagggccgggcagaagtctggggcaggggtgagagcagggagggcttcctggaggaggtgggttgcaaagacacagggaaggactggccaagccaaggcctgtgaggggcagcggctgtgagtgatggccatggacaacgggcacagtgggggccgggactgcatgtggcgggtcgtccacgccgggccaggccgcagcaccctgattccctctgtccccaggatggcccagctgaggctggtgctggggctccacaccctggacagccccggtctcaccttccacatcaaggcagccatccagcaccctcgctacaagcccgtccctgccctggagaacgacctcgcgctgcttcaggtgtgcagggacgggacagggagaactgggcaccctcctgtcccccacgggtgcccctcacccccactgcgccctccccccgctgccgaccctccccccgcactgctgcccctccccccgcactactgccccctcccccattgcccaccctccccccactgccacccctccccccgctgccgccccccgcccccgcactctcaccccctccccctgctcacctgccccttcctgtcactcgtagctggacgggaaagtgaagcccagccggaccatccggccgttggccctgcccagtaagcgccaggtggtggcagcagggactcggtgcagcatggccggctgggggctgacccaccagggcgggcgcctgtcccgggtgctgcgggagctggacctccaagtgctggacacccgcatgtgtaacaacagccgcttctggaacggcagcctctcccccagcatggtctgcctggcggccgactccaaggaccaggctccctgcaaggtgaggggcgcccgggtggggctgggggaatgaggctggcgggagggccggggccagggcagccgccgggcaggttcctggctctcccgttctctggggagtcctgtcaggggctggggggcggggaagcactggcaggggtcccgtttctcaggtgcagaaactgaggctcagacaggtttagcaacctgcgcaagaccacacagccgggaagcggcagagctgtgacttctgctccagccaagacggtccggcgggggaagaaggagcagggttcacagggccagcgggagatggggaggggacacgcgtgggccgggagcagcccctgtgtctccttgagcctggggataacaggcctggccctgctcccctcggcgggccctgctcccctcgtcccctcagcaggtgcagaggctgagctgcggtgtgtcgtccctgcagggtgactcgggcgggcccctggtgtgtggcaaaggccgggtgttggccagagtcctgtccttcagctccagggtctgcactgacatcttcaagcctcccgtggccaccgctgtggcgccttacgtgtcctggatcaggaaggtcaccggccgatcggcctgatgccctggggtgatggggaccccctcgctgtctccacaggacccttcccctccaggggtgcagtggggtgggtgaggacgggtgggagggacagggagggaccaataaatcataatgaagaaacgctcagagcccgcctgagtcccagcccacctctgtccatgctggctgtggggcttccgacaaacctgtttccctcagcctcccgagtaactgggtctacaggcgcccgccaccacgccaggctaacttttggtatttttagtagagaaggggttt[144 bp omitted]tcccaggagggggcggcgttggccaggactggagcggtggccgggtctgcaggctggcaggggtgggcggccgtcctccccgcgtggctcctggggctgggccttgaacagcatcccaggatcttcttttttagtaacagcttttatcaagttacaactcacatagcagatgagtctccctgtaaactgcgattcaggggcctttggtacctgcacagagctgggcaaccaccaccgtgacatgtcaccccagcaccccgaaaacaggcccgtccccagtcaccccagcaccccgaaaacaggcccgtccccagtcaccccagcaccccgaaaacaggcccgtccccagtcaccccagcaccccgaaaacaggcccgtccccagtcaccccagcaccccgaaaacaggcctgtcccctgtcaccccagcaccctgaaaacagtcctgtcaccccagcaccccgaaaacagccctgtccccactgtcaccccagcaccccgaaaacaggcctgtccccactgtcaccccagcaccccgaaaacaggcccgtccccactgtcaccccagcaccccgaaaacaggcctgtcaccccagcaccccgaaaacaggcctgtccccctgtcaccccagcaccccgaaaacaggcctgtccccactgtcaccccagcaccccgaaaacagccctgtccccactgtcaccccagcaccccgaaaacaggcccgtccccactgtcatcccagcagcccgaaaacaggcctgtccccactgtcaccccagcagcccgaaaacaggccccatctctatcaccccagcaccccaaaaggaagccccacccccattgtcattccagcaccccgaaaatagactctgtccccactgtcaccccagcaccccaaaaggaggctcgtccccatcggccgtcactccccgtccccaccccagccccggtgccctcacatcccctccctgtctctggatgggcctgtgctgacatttcatggacaggggatcacgctgcgtggccttctgtgtctggcgtctcccgctgagcgtgacgtcctcaagctgcacccgcgcgctggctgggtccgagccgtgctcctgctccggggggtcgagctccagctcgaggggggcctcgctgcgtttgtgggtgcgtccctgggtgcacatctgggcggcttcgtctgcgtccgtccgtctgaagctttgctgggagccgcctgtgtgcgttttcgtgtggacctacctgctccttcctccctccagattagacccgtgggagtggcatctcgggctgttcagtgactctgtttcagcgccgcgctgttttcctgcagaatcttttaatttcactaccaactctttctttcttttcttttctttcttccctttcttccccttcttctctttccctcccttccccttcttctctttccctcccttccccttctctcccctcccctcccctcctctctctttctttctttcctttctttcctttcttccccgtctccccttcccctcccctcccctctcctcccctcccctctcctcccctcctctctttctttctttctttctttcttttcttttctttttttcttttattttcctttcttttcttctgatggagtctcagtgcgtcacccgggctggagtgcagtggcacgatctcggctcactgcaagccatctcaggttcaagcgatgcttgtgtctcagccacctgagtagctgagggatcacagacgtgcaccaccacgcccagctaactttttttgtatttttagtagagactaatagaaacacaggtttcaccacgttgaccaggctggtcttgaactcctgacctcaggtgacccgcccacctcgccctcccaaagtgctgggattacaggcatgagccactgtgcccacgttaatggttttttattattttattttatttttagacagttcccactctgttgcccaggctggagtgcagcctcagcctcccaagtagctggaatcataggggtccaccaccaagcccagctaatttttttggatttttactagagacggggtttcaccatattggtcaggctggtctcgaactcctgacctcaaataatccacccgcctcggcttcccaaagtgctgggattacaggtatgagccactgtgcccggccgggttagtgttgtaatagacttaatttttaaaaccatttttggtctgcaggagatgtgtggcggctgtatccacagggtcccccgcgtccccgcccccaggctcctggccgctcccctctccagtcagcaggagtcacggctgacgaactcacatgaatgcgtgattaactactaaggacctactcttggctcggatttcctcagtttcccctaatgtctcttcctgcacagggtcccacccgggaccgaacctgccgtttcgccgcagcctctcctcggcacccccaggctccgaccgtttctcagaactccgtgtctggaggccggctggacgggatttatgtagattacgggtgtggaccactgcacccgccagctatctcatgtttttctctcgattggactggagtcacagtgtttttgggagaggcaagtgcatttttaatctttaacttttttaatttttttatgttatttttttagagactcctgggctccagcaatcctcccacctcagcctcctaaaggattacaggtgtgagccaccgcgcccggcctaatctttaactttttatggcatcattggcagtggaaggttctcaggtcacaagtgaagagcctcataactcacaaaccaggcacgcccctgttcccggcacctgggtccagacacaaccccctgccccgaagcccctccttagccaagtacccaagtccagtctcttttttttttttttgagattcgagtctcgctctgtcccccaggctggagtgcagtggtgcaatctcggctcactgcaagctccacctcctgggttcacgccattctcctgcctcagcctccccagtagctgggactacaggcgcccgccacca[175 bp omitted]ccctg[136 bp omitted]ctgcctc[134 bp omitted]gtctcccaaagtactgggatgacaggggtgaggcaccacgcccagcccctttgggtttttaaattgttcattcatggccaggcatggtggctcgcgccggtaatcccagcacatcgggaggctgaggcgggcggatcacgaggtcaggagttcaagatcggcctggccaacatggtgaaaccctgtctctacgaaaattacaaaaaaaattagctgggcatggtggtgggcacctataatcccagctacttgggaggctgaggcaggagaatcacttcaagccgggaaagggaggttgcagggagctgagatcacaccactgcactctagcctgggcgacaagagcgagactccgtctcagaaaaaaaaaaacaaaaaaaccataaataaaaaattttttaaaaaatgataaatgtttgcaactctagctatgttaatgtctgatcagcacacattgtatgtattgaaacgtcactatgtaccccatgaatatgtacaattattatgtgttctttttttttttgagacagagtattttgctcttgttgcccaggttggagtgcagtggcacgatctcggctcaccgcaacctccgcctcccagattcaagcgattcccctgcctcagcctcccgagtagctgggattacaggcacccgccaccacgcccggctactgtttgtatttttagtagagacggggtttcgccatgttggccacgctggtctcaagctcctgatgtcgtgatccgcccgcctcagcctcccaaggtgctgggattacaggcgtgagccaccgcgcccg[226 bp omitted]cctcttggcaatgaaagctgcccggggcagccctctccctcttcctggtgcaggtgtgttgccagcgtggatgtccttcgtggacgtgaacttattttacaaaagagcacttgtccagagctagtcctgagcctgcggtttctgggagtcaccagctcgaacgacgcaggacaagtacactttggggtggcacgtcctggtgctgttattttggggtggggtgtccttccgtggtacggctggaccacgttgcctctgtccactcactgccctcgagggatgggtgagctgtttccacctttggctgccgtgacctgggctgctgtgaacttcgcagacgtttgtgtttctttcccgcacggaaacttggacagaagctccttgtcacgtcccacagtcacacggcccctgcacgtgcttaaaagaagctgtggtgtttttttttttgttttttttttttttgttgttgttgtttgcttttttttttgagacggagtctctgtttccaggctggagtgcagtggcgcaatctcggctcactgcaacctcctcctcccgggttcaagtgattctcctgcctcagcctcccgagtaggtgagattacaggcacccaccaccacgcccggctaatttttgtattttcagtagagatggggtttcaccatgttggtcaggctggtctcgaactcctgacctcaggtgatccacccgcttcggcctcccaaagtgctgggatgacaggtgtaagccaccgtacccagcggaagctgcgattttccttattccttgacatcctcaagggagaccctgatgtagaggcagggaggctaggaaggaggaagcatccagcccagtggggtggacccgtcagaaatgctcagaggcggccgtgcatggtggctcacacctgtcatcccagcattttgggaggccgaggcgggcggatcacctgaggtcgggagttccagatcagcctggccaacacagagaaaccccgtctctactaaaaatacaatgttagccgggcgtggtggcgcatgcctgtaatcccagctactggggaggctgaggcaggagaatcgcttgaacccgggaggcggaggttgcagtgagccaagattgcgccactgcactccagcctgggcgacaagagcaaaaaactccatctcaaaaaaacaaacaaaaaaatgctcagaggcaagggttgagcttcctctccagcctcctccagaggtcacagggcaccgccccaccccacccaccccacccactgggtcctggggtgactccaactggacagagatcagtggaggccaggccaggctggtgtttggtgagctggagccacgccccggggagagagctaatctctgagcccggacgtgcctcatcagtggttccctcctgctgtgctgagatgtccccaccccagccccggtgagtgactggggacttagagacacagaaccagccaccagcaggaggctgacaccctgtgtgggacacgcagtgccctggaagcctccacccctccgtctgtgttttcgtggttttttttttttgagacagggtcacccaggctgcagcgcagtggtgcaatcctagctcactgcagcctcaaactgctgggctcaagcaatccccttccctcagcctcctgaggagatggggctacacgtgtgcaccaccacgcctggctaatgtttgtaattttgccgagatggggtctcagtatgttgcttaatggagtctcaaagtcctaggctcaagtgatcctcccgcctcgacctcccaaagcgctgggatgacaggtgtgagccactgcgccctgccagccctcgctggttcctcctggtgtaaaagggaacagccgagtgagcatctccgggtggccggtgggcagagctctggtctcaggtggtttaaactggacaggtgtcacccgggagcttgacagtgacgtgggaccacatgctgggtgacttaaacaacagaaggcagcccctccccgtcctggggcccggagtctgaggtcaaggtgtgggcaggcgccgctctctgagaggccccacggaggagtcctcctgccttctccagctccgggggcgccaggcgtccttggcttgtgtccacattgctgcagtctctgcctctgtccccgcagggacgtctccccatgtctcagtccaaatgtccctcttctgatgaggatgccagccattgcctcagggccacccttacaactttatcctaactacctctgccaaataaggccacattctgaggttctgggtgggcgtgagttttggggggcaccgttctccctgggaagacgcagacgcttgtcgtcccgtggtaaatgccagaaggcctcatctgatgcccacgtacgccctgaggtggggaagctgctgtcctcatccttgctgagcgtggggccccaggattctcaggcagctggatgagcctgtggagaggccggtgcccaggctcggtcccagaacaaagcgcagaggcacgatggtcgctgacaaagtgggggccccgggaccccaaacagaaaggtccacaaaggctgaggtcggggcaggggaatttgattcaagagacattttcagccatacggcccttctcgaatttttttttttgagacagtctcgctctgtcacccaggctggagtgcagtggcgcaatctcagctcactgcaacctctgcctcctgggttcaagcaattctcctgcctcagcctcccgagtagctgggactacaggcgcccgccaccacgcccactaattttatatttttagtagagacggagtttcaccatgttggccaggctggtctcaggtgatccacccgccttggcctcccaaagttctgggattacaggcatgagccactgtgcctggcctttttttctcttttttgagatggagtctctctctgttgcccaggctggagtgcagtggtgcagctgactgcaacctccgcctcccaggttcaagcgattctcctgcctcagccttccgagtatctaggattacaggcacgcaccaccgcacctggctaatttttgtatttttagtagagacggcgtttcac[142 bp omitted]tcacaa[138 bp omitted]aaccctgtctctactaaaaatacaaaaaattagccgggcgtggtggcgggcgcctgtagtcccagctactcgggaggctgaggcaggagaatggcgtgaacccgggaggcagaggttgcagtgaacagagatcacaccactgctctccagcc[145 bp omitted]accctgtctctactaaaaatacaaagaattagccaggcgtggtggcgggcgcctgtagtcccagctactcgggaggctgaggcaggagaatcgcttgaacccaggaggcggagcttgcagtgagccgagatcatccagcctgggtgacagagcgagactctgcctcaaaaaaaataaaataaaataaactctgaaatttaaattaactgggtatttttatttgctaaatgaggccctacagggggtggtcctgaagaccctctccttggcagataaaagaggactgggatcttcttgcttctggggccagaactgagcagagcaggctcgggggttttgggtcgggggcaagggggtccctggctctgcctgagggtcagggaaggctttccagggaagggaccaggaaacagggtgttgaaggcggccacaggctttattttgtaaacaaagaccaagttcccaggagaactgacctcaggccagattggggccttgccaggggagggctgcggagggggcaggaattgggccaggccctgtggttgtttacaaccctggaggggctttgaaggcagctggccctgctgggcctcatccgcgtctgtgtcctcgttctgcacgtagcttcagaccctccccctccaccccccgcccccatgaggactttccaagcctgtggccccccaggtgggagctctttggcaccggtggttctgaggctccaagtcccctgatccgaagccatccccgagagggggtctcccagagtgggaagcgggggtctcccagagtgaagccctcagccccgtccaggccctcggcccccagcatcttcccaccctggctgggcccagccttcgccctggatggggttttctgcccctgcccaccgtgtgctggcccctcggttacgcacatcaccctatttatttatttagagacggagttttgctcttgttcctcaggatggagtgcagtggtgcgatcttggctcactgcaacctccgtctcccaggttcaaaggattctcctgcctcagcctcttaagtagctgggactacaggagcccgccaccaggcccggctaattttgtatttttagtagagacggggtttctccatgttggtcaggctggtctcgaactcccagcctcaggtgatccgcccgcctcggcctccgaaagtgctgggatgacaggcgtgagtcaccgcgcctcatcccctcctcagccccccagcacccacacgtcccctccctgtctctgtggatgggcctgtcctggacatttcatagacatgggatcacacagtgtgtgtccttctgtgtctggcgtctctcactgagtgcgacttcctcaaggtgcatccgcgccgtgggctgcgtccgagcctcgctcctgttcacggctgagtcgtgtcccattgcgtggatgggccatgctg[236 bp omitted]cggcctcccaaaagcaaccattttatttgtataactgtgtccaaattgttagaaataagtgctgggtcccgcaaagagaaaccagcccttagaaacctatttcccagcgagacaactttactatacagaatggggctgccccggagctcacgggacgaaggaaggaaggagcttctgttcccccgctggctggggctggacgccctcatctaagctcatcccggttggctaagacttaaaactgtctccaaatcgggtaaaggcaagatttgcgagaagaggagggctagggggaagaagggggtagggttgattgacaacttatgacctggaagttgagttttgtaagaggaatttggttgtctcaacaatttac[140 bp omitted]ttctcctgcctcagcctcccgagtagctgggactacaggcgcccaccgctacgcc[181 bp omitted]gctctgttgcccaggctggagtgcagtggcgcaatctcggctcactgcaacctccgcctcctgggttcaagcgattctcatgtctcagcctcctgagtagctgggattacaggcacgtgccaccaaacccagcttatttttgtattttggtagagatggggttt[132 bp omitted]ttgttcttcttgatcgtctaggaacaagagcttatcggaatacagagcaggagaggtaggggaggtttttgtgagagctgcttctgtgagtctttgggttaacccgcgaatacaaaggtatgacacagcagcccacaggatgagtcctcctgtagcaattgcgagggaggtaaagattgaggtcagcccgggcgcggtggctcacgcctgtcatcccagcacttcgggaggccaaggcgggtggatcacaaggtcaggagtttgagaccagcctggccaacatggtgaaaccccgtctactaaaaatacaaaaaaattagccgggcgtggtggcaggtgcgtgtaatcccagctacttgggaggccgaggcgggagaatcacttgaacccaggaggcggaggttgcagtgagccaagatcatgccattgcactccagcctgggcgacagaacgagactgtgtctcaaaaaataaaaataaaaatgaagaaaagaacaaaaaaaagattgatgttatgagtcccttccattttccaaaccacctttccatcagtcccatcaaggggccatctattccagagtttatggctaattcatttgttaggtcggtaaggccctgtcaggctttcgagatggtcccatcagggcctgtattatctgggatcgaagtaacgatgcgctttatttatttatttatttttttgaaacggagtttcgctcttgtagcccaggctggagtgcaatggcgtgatcttggctcactgcaacctccgcctcccaggttcaagcaattctcctgcctc[135 bp omitted]gcctcccgaagtgctaggatgacaggcgtgagccaccacgcccggccggtttgtgactattttctctaactttacctaatgtttccctttaatatttctgccaccatcctgagcgaatttcaacagggaatggcaccccagggtaccggttactacaagggctgggccaaggattttcttcagaagaggctgtctttggctgtggatatctttacggggtatatgaaccagacaggcatcaaacgaaactagctggggaaagggtgatcaccttatattgataataagacgtccttgggcggctacagggagaaggaagagacagattaaacctttttgaatgttaatttggaaggcgttgatcctggagtgaaggtccaagatccctccagggatggggccctttccgaccgtcatcttggtggtcaggagcacccgataaagtccttcccaggttggctgagtttttcctctttccaacttctgacaaggaggtgatccccaggctggtgtcggtgaactgggaattcgaggggtggaggccttgggtccggagggaggaaagggtggaagacaaaccacacatatagtttttgagaaactgatcttttgtttcaaatgtaggaaggtcagtagtggaagtcagataaggtagcccatagagcatctcataagggaacagg[131 bp omitted]attctcctgcctc[219 bp omitted]tctgtgcgtggtaaccaggtttccaagattaattcggttaggtggtttttttagagtttgattcattctttctaccctccctgatgagggtggatgccagggaaatattcccatttcattcctagtgctggggttagccccgtaatgatgtgtgcagtgaagggggtccccttgtccgaatccacgttctctattagtgcaaacctgggtgtgacgtgttcccacaggcctctgactacattgctggctgttgcgctcgggaagggggtggcctctacccagtgggtgagatggttgactgttcccagtaaatgtttgaggtgggctattgggggcatttcagtgtagtcaacccaaacactttggaacggcctcaaccctgggtttcttccctgggaggttgcctcttttttttgagatggagtcttgttctgtcacccaggctggagtgcagtgggaccatctcggctcactgcaagctctgcctcctgggttgatgccattctcctac[226 bp omitted]tctttagggtttgcttattagcttttctgcacacgatgcaaccatccacatttgcctagcgagggtctctatcccacacacccacagactccaagggtctctatcccacacacccacagactccaagggtctctatcccacacacccacagactccgagggtctctatcccacacacccacagactccgagggtctctatccccacacacccacagactccgagggtctctatccccacacacccacagactccgagggtctctatcccacacacccacagactccgagggtctctatccccacacacccacagactccgagggtctctatcccacacacccacagactccgagggtctctatccccacacacccacagactccgagggtctctatcccacacacccacagactccgagggtctctatcccacacacccacagactccgagggtctctatcccacacacccacagactccgagggtctctatcccacacacccacagactccgagggtctctatcccacacacccacagactccgagggcatatatcccacacacccacagactccgagggtctctatccccacacacccacagactccgagggtctctatcccacacacccacagactccgagggtctctatcccacacacccacagactctgagggcatatatcccacacacccacagactccgagggtctctatccccacacacccacagactccgagggtctctatcccacacacccacagactccgagggcctctatcccacacacccacagactccgagggcatatatcccacacacccacagactccgagggtctctatcccacacacccacagactccgagggtctctatcccacacacccacagactccgagggtctctatcccacacacccacagactccgagggtctctatcccacacacccacagactccgagggtctctatcgcacacacccacagactccgagggtctctatccccacacacccacagactccgagggtctctatcccacacacccacagactccgagggtctctatcccacacacccacagactccgagggtctctatcccacacacccacagactccgagggtctctatcccacacacccacagactccgagggtctctatccccacacacccacagactccgagggtctctatcgcacacacccacagacttcgagggtctctatcccacacacccacagactccgagggtctctatcccacacacccacagactccgagggtctctatcccacacacccacagactccgagggtctctatccccacacacccacagactccgagggtctctatcgcacacacccacagacttcgagggtctctatcccacacacccacagactccgagggtctctatccccacacacccacagactccgagggtctctatcccacacacccacagactccgagggtctctatcccacacacccacagactccgagggtctctatccccacacacccacagactccgagggtctctatccccacacacccacagactccgagggtctctatcccacacacccacagactccgagggtctctatcccacacacccacagactccgagggtctatatcccacacacccacagactccgagggtctctatccccacacacccacagactccgaggctgcattgcacgtagcttggggacccgagtgagctccttgatgaagctctgacagtatttccctcatgaggggtttagacagcatttcccttcaatcctacttgaagggaaatccctacagagggaaagtggtacctactttccctct[143 bp omitted]agcctcccgagtagctgggactacaggcacccgccaccacacccagctgatttttgtacttttagtagagacggggttt[272 bp omitted]cctgtctctactaaaaatacaaaaaattagccgggtgtggtggtgggcacctgtagtcccagctactcagagaggctgaggcaggagaatggcgtgaacccgggaggcggagcttgcagtgagccgagatcgcgccaccgcactccagcctgggcgacagagtgagaatccgtctcaaaaaaaaaaaaaaaaagactgagcgtggaacaaagggcttgactttgaagcgtgcagcggcgtgaaacttgcagtgcgggaaagtgaatttacagacgcaggacagaggcagttaatcgtacagtgacaggtttcgtaacctcagccgagcttgtgagcttgcggccgcattgagaaagaacaggagcttacaaaactggcagagtattttacggggagcgggaaacggaaggaggagtctggttcttatctttgcacggggggagtgcagtgctgggaggcgtctgggcggcattccttggggttctggctttttaaatggtgttttcaaggccttgcctgggggctttgcctgttgctggctttggggcgagtcagctttatacgaaaaaggtattttccgtttcttcaatttccgctttattccctccttgatgctttttataaataaggtttaatagaaagcatcactattttttatttacttctacagggggaagtagctcttttcctggcaggggtggacacgtagttatgggatgagctcggtggtactcggcctgtccacacgagcgtctctggctttgtcgatattcttgacaaggaggggaagagacaagagtacgaggcggactcccagtatggccagaactactcctagtaaggttttaaatcccccgagggatgaaaaccaaccacgggggggcggggggaacctggagaccattccggtttccaggtttgtgttggaacatgagctaagtctcgcattctcgcaattaattcatgacgtcctcctcattgtcatcgatttttaggcaacaattagttaaattaaactctccgcatatccctccttctgacatagatctagcgagagcagcaagaacaaagggaagagtagcatgtttgtacctaggatggacaagagatgtttgcccagaggagggggttgagcaaagcgacaggttaatagtaaaacaattaagatgacaaggaaaattactgggcttaagatttctaactacatttacttccttgacgaagcttcggccgtgcgtagactggtcagcttccggggtgactagagcagggctgtggtcactttcactggcatctgggtcctgtcgtaggatcagccggtttggatggtctgggtcttgctggctggtccacttgtcctgggctgctggtttcagccgactgtggagatcgaaggcacagttcctgaaacattaacagcagtgggagtggacaggatcgcagtctaggcccatcccatctgggtcccaaagtggttggattctatttctttttttttttttttgagacgaagtatcactcttgtcccccaggctagagtgcagtggcgcgatctccggtcactgcaacgtccgcctcccgagttcaagcgattctcctgcctcagcctcctgaatagctgggatgacaggggcacaccaccacgccccgctaattttgtatttttagtagagacagggtt[138 bp omitted]aaactaagcttttttgtttggagaataacgtgggacctctgggaggggaggctccgggaggagaggcacagccagggcttcctctttagaatgtggtgtccttattactgcccgttttgcctcctcgtctgcctttgtttcctttggcctccagtgttcctgccttttgtgcaccctgcaacgcagaacagctacgtctttggggcccacacggcatcctggagctgtaaaatttctttttttttttttttttttcatatggagtttctctcttgttgcccaggctggagtgcaatggcacgatctcggctcaccgcaacctccgcctcccaggttcaagcgattctcctgcctcagcctccctagtagctgggattataggcacctgccaccgcgcccggctaattctgtatttttagtagagatggggtttctccatgttggtcaggctggtctccaactcctgacctcaggtgatccgcctgccttagcctcccaaagtgctgggattacaggcctgagccaccacgcccggcctaggagctgtaaaatttcttctttgtattttatttctttgcccccagcagttaaaagttctctttcttggctgggcgtggtggctcatgcctgtaatcccatcactttgggaggtggaggcaggcggatcacttgaggtcaggagttcaagaccagcctggccaacaaggtgaaaccccgtctctactaaaagtacaaaaattagccaggcgtggtggcgcgtgcctgtagtcccagctactcaggaggctgaggcaggacaatcgcttgaacctggcaggtggaggttgcagtgagccgagatcgcaccactgcactccagcctgggcaaaagagtgagactccatctcaaaaaagaaaaaaaaagttcctctatgggatggtctttccaattttcttttttctttctttcttttttttttgagacggagtctcgctctgtcgcccaggctggagcgcagtggtgcgatctcggctcactgcaagctccgcctcctgggttgaggccattctcctgcctcaggctcccgagtagctgggactacaggcgcccccaccacgcccggctaatttttttgtattttagtagagatggggtttcaccg[241 bp omitted]tgaaaccctgtctccactaaaatacaaaaaattagccaggcgtggtggcgggcgcctgtaatcccagctacttgggaggctgaggcaggagaatc[135 bp omitted]ctcgggaagtattttgggtttgcagatctgattcccgaatccttgtaattatcccatctccgagatcgctcatgttttttaggtcacattgtcatcccacccaggatcttgggccaggaatttacgctccgctgaaaggacgttctgaccggggggtgttcacgctcccagactaacacagcggcctgtgaatcatggttctctctctcctgagacgagagtactgagggtagacattaattcagcccaagcgtacagctgtggccccagaaattggtcaatttgatccgcgaatccaaaagggtcatctaacagtggtttgagttcttttagatttctaacctctgaactggttaaagggggcatttacgaagtcaatatcccttcctcccggtggtccttccctaaaggggaaaagggctgaggcaggtctttttgagcaggaggcaaaaggaaagttctgtgggtttttgtttgtttgtttgttttttgagacggagtctcgctcttgttgccgaggctggagtgcggtggcgcgatctcggctcactgcaagctccacctcccgggttcaagacattccctgcctcagcctcccgagtagctgagtagctggaattacaggcgcccgccaccacgtccggctaattttcgtatttttagtagaggcgaggtttcatcatcgtggccaggctgccagtcctgaactcctggcctcgtgatccacccgcctctgcctcccaaagtgctggaattacaggcgtgagccaccgcgcccggccgaaagtttcgaatatccctttggcattgttctgtttcccgttggagctttcctgaggaaggggcatgttctagtggctgtccagcggggatgtgggtggcaaggtccaggtggttctataggggagggatggaggggcggaggagcgggtgggggaggggcggaggggcgaggggtgggtgggaggggcggaggggcgggttggggaggggcggaggggtggggtgggtgggtggggggggcggaggggtgggttgggaggggcggagggggtgggttgggaggggcggagggggtgggttgggaggggcggagggggtgggttgggaggggcggagggggtgggttgggaggggcggaggggtgagtgggggaaggtggtctagaggatcccacccttctttagatatggggcgtctctgctaaaaatacaaaaattagccgggcgtggtggtgcgcgcctgtaatcccagctactcaggaggctgaggcaggagaatcgcttgaacccgggaggcggaggttgcagagagtcgagatcgcgccgctgcactccagcctgggtgacacagcgagactccaacacacacacacacaaaagatatggcgcgtctcattcattcacaagttcctcttcaaaggtttggctcgttcagcgccctcgttcttcgtttcctacttccaaggccaacctgacttcctcaccctctgggcctccccgtctgagtctcagtaaacaagtttcccgccggtcctgatctgcagagatggcacctgccacccactctgcacatccccctcccgtcgccacgggctcttcccgccagtgtagccacattcctgcccctttccagttagcccttcgcgttcggcttagtctgcggtcctcttgcattgcgactccgagtttaacttccaacacacactttcaacctccaagagacgcccccacctgtgtcgccccaatagcgacttttctcaccgtggtcgccgcggaacttcaagggtccttcctacccgcgttgctgagagtctgggtttacgcgtcacctcgggcgggacccgatcctccgctcctgaggcccccacaatgaagcagtcggacgcgtctccccaagaaaggtaaccgccagcctctcctgaaacagaatgggatccaaatgggatatttgggggcggcgagtcggtcccgcaaagagaaaccagcacttagaaaatttctcagcgagaccactttacttgtacggaagggggctgcctgcgtgggatgcaatctccagagcacacgggacaaaggaagggagcttctgttcctctgtcctttccctgttggctggggttggacgcccacaatctaagctgatcccggttggctaaaacttaaaacttttttaaaatagggtaaacgcgccacctgcgaggaaagaagaagggggtaaggttgattgacaactttagacctggaagttgagtttctgaagaggaacttacttgtcccaaccaaatggtgcacaggacgtttatactaagaaattattcattttctgagatccagattcaagtgccctttaagtatttttatttgggcggaggaggtcacttcctcccacctaatttattaatacgttcatatatatatatatatatgtacatttttaaaggcagagatgtgcgtctcgccatgttgccgcgtctggtctcgagctcccgggctcaagcgatcttcccgcctcgacctcccaaggctctgggagtacagacgtgagccacagcggccggcccgtgtttaactcagataaaatctgggtaacacactttcaacgcttcaaccccctcgggcgcaccgctctgcgctcattgcaactttgaaagcaggaaggaagaaatgcgcaggctccagccgcgtccccgcaggccccactcccgtttcctagcaacgccgggtcacgtgcgccgccgcccggattccgtagcgtgagcctgccggagccggcgcgtacatgcgagcgtgtgcgcgcgtgcgcaggcggggcgaccggcgtccccggcgctcgccccgcccccgagatgacgccgtgcgtgcgcgcgcccggtccgcgcctccgccgctttttatagcggccgcgggcggcggcggcagcggttggaggttgtaggaccggcgaggaataggaatcatggcggctgcgctgttcgtgctgctgggattcgcgctgctgggcacccacggagcctccggggctggtgaggagcgggtagggggcgggggtgcggtcctgcaggggccgggaatggaggccgcggtgccgacccgaagccgacgggagcctggggcctcggcgcggggcggcctggggtgcgaaaggccggccccgggggcttcccgcgccagcatggagcttgggggtgaagtcccagggtttgaggggggactagaggttcctcccggcgcggcctgccgggctcccccgggcgctccggcctcgagcccggcctctgtgtgtgggcgtgaagctccctgcttggaggcgggagccagggggtcctggccaggccggtcttggtcaggggaggtgggcgtcttgcttttcggtcacctggggttgggggtgacctgcttcctgggtgagggcgtctgcgaaggcggttggaggtggcccgcccgccggtcccatcggccaggagaagggagacccaaagcctgggtgagcgtcccctttggcctggagccaggggtcaggggctggttggtgcctgcccaacccgtcctgctggggctggactccgcaggacctggggaaagcggcctgggcgtggaatctggagacgggtccaccctgcctgcgagtgttagggtcagagaccctcccctgagactctctggggcccccgcaagggcccgtgcggcctggagcgatcatcttggcgctcccttctggaaaaggggcttttgtcctccaagagcacatggaggctctgagtgggtcagccctccggatcgggaagggattaccgttcttcacgggatttagccctggcgtcttgcctagggcgtgcacctgcccccgggtgttctcccagactcttaagacctcgcaggctccctcgaggggccctgcgtggaagggaaggcggaatctccctctgattctgcctggattcagcacccagaatgaggtggtctctgaacgcccctcctcctttacaggcgaggaaacagccctgtgggaagtcgaggttccaaggtcacagtgagggggccctggccacccgattcagcgcaggaaatagtgagaaagtcgtttttagccgactctgacccgcattcggtttccagtgctgtcttaggagggccgtgtgttgagggtgggcaaacgtggtttggagagcgcatttgggaaatggattgaggtgtgtttttccgggagaaaagcatgacatcctttcttgcttcatagaaaatttcttcctttgttgagacccccatttggttctgggttaaagatttatagtgaggccgggcgtggtggctcacacctgtaatcccagcactttgggaggctgaggcgggtggatcacctgaggtcaggagttcaagaccagcctggccaacatggtgaaaccccatctctactaaaaatacaaaaattagctgggcgtgttggcgcacgcctgtaatcccagccactcaggaagctgaggcaagagaatcgcttgaacctgggaggtgaaggttgcagtgagctgatatcatgccactgcactccagcctgg[222 bp omitted]gaggcaggagaatggtgtgaaccagggaggcggagcttgcagtgagccgagatcgcgccattgcactccagcctgggcgacagagcgagaccccgtctcaaaaaaaaacaaaaaaaaaatttattgtgaccgatgtgttgggaacaaggtgcagagctggagggtctggcctcctgaagggtcaagagcaagggcttcgagcctctgtcctgggcattgagccgtagggggccttgggcagaggctggggagggggctccttcttccagaggctttgccagctaactcctgacctacgtctgagatttcgtcttcctggtaaccaaagtggccctttatcgaatgtctcctgggcaagggcctggccccagcactgcggccagctctctggggagacacagataggagcccatgggtgaggtgagcgcggaagataagccgcccccgccagccctgtggaaacccagccaggcctgactgggtttcaagcacagcacgaggttcccacattgagctaatttggacagccaagtgggtgaaagacctttggtctctccctgctgggtagggtggttcacagttttgttccttttgtgcatttgtgcaggagactgagaagggtttcttctgagcagaaagcttagcctggggcttactggccagagctgcctgcagcctgggaagcaggtggagtctgcagtgctggcagcgccgccgtgcagcggtgtagccgtgtgtgcgcgtgtgtgtgtgtggtgagaaaccccacttttgctggggactgactcgtgaagaccacaaggtctgggcaacacagccttggcccgtgtggggtggacactgctgtttgctctgtgaattcgtgactgtgtttgcctctcctgaaacttgcttcaggggcgtctgcgggttggtggggcacagccgggtggggtgagtgcccaaggttggccgtccgcgtctcctgtgggcttgtcggggaccggagggccggggtgtgctagctgggtcccgagggtggagggcttcacccccgagcctcagatgagaggagtgggagtgcctggctgcggccggtgggggtgggtgggggaggtgcccgaggctgcttcccagagctgttctcgctggctgctgtctgagcactggggtgggtggggaggagggcgggtgggggcgggcagccttatcctgcggggctgcttgtgtacaagtaccacgcggcctgcctggccctgagccctgggcaaggaggcggaggctgtttttagatgaaggtgactttacttgagaacatgggttacgtctcatgtggccagaatcgaattctaacctttctggggctgtggccgagggtcaggcgccgtccctcctcctgctgctcatgggtggaggctcctggtgcggcgggcgagatggggtggtccgtggggtgggggcgctctgcattgtccccgaggagcctctatggaggctttctcttccggacgcccccccacccccagtgacacgtcaatacacagacaccagcatcatcagcatccggagggacacagggttgttccatccaaagccttttggtccctttgggagcgatgctgcccgctgagaagctggcggacccagcgggagcaccgggaccggtgcagatggcgcctgggagcccgggactcctggaaaggtggctgggggcagctcggctgcgggccccacctggtcctcctcactttcctgtgtgccctgccctgcctggaggtggggtgaggtgagtcaggggccagccctctcctagcacccctgggtgaggaggatgtggagcccagccctgcaggtctggaggatgaggagaggggctgctgcagggcaggaaggagcttgccagctgggcagcctctggctgtgcttcctgccctgactcacctcgcccagctctgcacatagctgccagtgttgcagtctgggaaatcttaactcccaagaaatg[222 bp omitted]ctgaggcaggagaattgcttgaacccgggaggcagaggttgcggtgagctgagattacaccactgctgaacagagtgagactctgtctcaaaaaaaaaaaaaagaagaagaggagaaagaaaatggcgctgccaaaacttgtcaactgcgcctgcccagagctcacctgaggtgctcagacgtgaacattcctgtccccgtggccttgggggccgtgacctgtgcactgccacgcagcctcggagccgtgtgcacgcatatgcacgtgtgtatgtgttgtgtgtgtttgcagacgtgtgtccttgtgtgtgtgtgtgtgttgtagcggtgcctggggagtctgacctcagaaggtgctgtggggagggctgcaaggtcctggcgggaggaggcactccccacgcttccccttgggctgggctgttcctggcaggcgagtgctaggcacagtgtgaggttctgtgtggattctgctgtgctccttggcagctctgggggccttcccttgcatttcgaaggaaggggaggcgtgtggctggaggtgagaggccctgaggccctgcctggctcccagcttcccaaatccgcctctctctgggtcgccgccctcagagattgctgaggacacgagctttccacccacgggctgtcctaacggagccgggctaggggcttctggacagaggccgcctgcccctttgggctttggggtttgtttttctcagcagctcacccgggtctctggggtcagggtatcgggcagaagtcagaggacggtgcgcttgggacctgagctctgggcagccctcggggctcaggactcctggctcttctgcccagtttcatgtgttttgtgttttgaaaccacgtgtggtcccacagttgtgccctcagaagccgccgtggctgccgtgaggtagcagtggacgggacgcccacggtctttcccatgccatgctgtttccagccgggccccatcactctcccacaagctgaaaggaagtggcttctccaccagccctggctgggagtcctgtgggcgaggccttccccaggagctgccctcccaagtgccccaggcactaacaagaccccacgcgtgctctccccacagccggcttcgtccaggcgccgctgtcccagcagaggtgggtggggggcagtgtggagctgcactgcgaggccgtgggcagcccggtgcccgagatccagtggtggtttgaagggcagggtcccaacgacacctgctcccagctctgggacggcgcccggctggaccgcgtccacatccacgccacctaccaccagcacgcggccagcaccatctccatcgacacgctcgtggaggaggacacgggcacttacgagtgccgggccagcaacgacccggatcgcaaccacctgacccgggcgcccagggtcaagtgggtccgcgcccaggcagtcgtgctagtcctggaacgtgagtggcgggcacctccctccccgcctccctcagtttccctcctgtgccgctcgcctcccggctcctgctcagtagaacccagacgcctcctcccctctccgtcccgctgtgccccgttgggcccaccgcctggacggaggggcccggacctgaagggggtgggctcgccgcctgaccaccagcgctgggcggcctggctcggggcaggcagggctctgccctccagcaggtgggtcctcgtcctcccctcgaccctcgtgccatccgttccgtcgtttctgcttccccgggcgcctgcccggctccctccctgagcgtccatactgcaagcctgaggggccctccaagctcagcccaggcttgcaggtctcagaaccttctgtgtccttcgcagcatctcgttctaagggattttcaaatttcaattcctagcgggaatattgtaaactaaccaagaaccaagagatttgcttggttggggattggcagaagaaccggggtgctcccagcactgctggagtgccgtcagcctggggctggggggatgtggggccacctgagtgcctcctagagaagggcacgggagccttggccgggggtgctgtggctattttttttttttttcctggagatggagtcttgctgttcccaggtggagtgtggtggcacaatctcggctcactgcaacttccgcctcccgggttcaagcgattcttctgcctcagcctcctgagtagctgggattacaggcatgagccaacatgcccagctaattttttgtatttttagaagagacggggtttcacc[135 bp omitted]tttccagtttgtgctggggctgctacaagagctcgatgccctggtccctgctcagggacgtgggtgggtgccttgtctgtccccacaccctggtcccagcctcgtgtgtctctgggcaggaacatcgccaggcggggcctctgggttcccagcgccttagcccagggcccgccagctgccagcgaagggtgccttcccgaagggggtgccttcccgaaggggcctcctcagcaggcgctgggctcttcccttcccggaggcgtggccagaagttccccttgggcctccggtcctcggggcgtaagggccacggtgtatttttgggatgaaaaccagtccttcccggggaggagccgcaggttcctgggggtcaggcaggcagcgcgggccgtgctcctccactctgctgaccgcgtctcgccgggccttgcagccggcacagtcttcactaccgtagaagaccttggctccaagatactcctcacctgctccttgaatgacagcgccacagaggtcacagggcaccgctggctgaaggggggcgtggtgctgaaggaggacgcgctgcccggccagaaaacggagttcaagtgagtgcctgaccacgccatgccgccacctgccccttctcacggctctcttgccgccagcggcctgtggtccgtgagaacaaaagaccggtcggcaggcttgatccaggcggaagttagggaccagctccgcgcagacccccagagggaaaccccagggaggggtctgaggggcgtccttgtgaggcagggggctccagcagccctggcaggagtccccattgcttgctcctcactaggtcccgggcacgaaagggcgccacactgccaggtcccgggcacgtgtgcgggcctcccaggctctgtgctcctggcacaagagggcaccacactgaggcatgccctgctcggaccccagacgctgtcatggccggagctttgtcataactggggctgggacggccctgggagcacagagccttttgttttcaggctgactgggaagacggtcacagggtgtggggtgcagagcagggaccagaggtgtggggttcatcagtcggggagaagggggtctgttggttctctcacctgtggggtcttgccagcctggctctgtccttggggccgcacggggaccccaggagttcttttgaggttcagacttgactgggacagttttgctttttcactgtgccgtggttgggcccctggagaaccctgggtccttggaggcgtcctgcagagctggtacgcggctcacctgcctgctgtggttgcagggtggactccgacgaccagtggggagagtactcctgcgtcttcctccccgagcccatgggcacggccaacatccagctccacggtgagtcctgcagccaggggtaccgggcaccaccgactgtcgggagaagttgttggcctgaggcacccggcacatcccagagccctggccccctgctccctggaggggaacagccctcctgcgggaggccggggatgggggcgggcctgcggttccaggctcctctctctcaccctcctgtcagggcctcccagagtgaaggctgtgaagtcgtcagaacacatcaacgagggggagacggccatgctggtctgcaagtcagagtccgtgccacctgtcactgactgggcctggtacaagatcactgactctgaggacaaggtgagaagccaaggaggctgggggtcctggacccagccctcaggactgggtgagaggcctagactgggggtcccggacccagccctcaggactgggtgaggggcctagactgggggtcccggacccagccctcaggactgggtgaggggcctagactgggggtcccggacccagccctccggactgggtgaggggcctagactgggggtcccggacccagccctccggactgggtgaggggcctagactgggggtcccggacccagccctctggactgcagccctccagactgggtgaggggcctagactgggggtcccggacccagccctcaggactgggtgaggggcctagactgggggtcccggacccagccctccggactgggtgaggggcctagactgggggtcccggactcagccctccggactgggtgaggggcctagactgggggtcccggactcagccctcaggactgggtgaggggcctagactgggggtcctggactcagcccttgcctttggtcccctaggccctcatgaacggctccgagagcaggttcttcgtgagttcctcgcagggccggtcagagctacacattgagaacctgaacatggaggccgaccccggccagtaccggtgcaacggcaccagctccaagggctccgaccaggccatcatcacgctccgcgtgcgcagccacctggccgccctctggcccttcctgggcatcgtggctgaggtgctggtgctggtcaccatcatcttcatctacgagaagcgccggaagcccgaggacgtcctggatggtgagccgtctgccctcctgcccacatgccctgctctcggggtggcccagggccactcctggtccgtccctgccagccccaccgctgacccagagcttggaactgaggagccccaggcagggagttgatgggaccccgaaagaaagtgtgggatggagggtctagccccgggcagctgcggctcagtgggcagcgggaccccgggaggaggaggcggcacctccgccccacagcctcacccggcccttccctcccgctcacttggctgcaagccagtgtcctccgtggtgagccggcccttgctgctctgcatgatcaggctcgggaacctgaggtcagccatgctgtgctccggcagcccctgcctgcctcctcgcggagcccttctgccccttgggctgcgtgtgccggggcgaggcctgtgtggggcctgtgatggcagctcctggaaaacgctgtggggcaggggtgaggcccacgaggccatggggacagctcaccatggggagcacacctgcaggtggggagggctgcctttccccacagcactcagaagatgcacgtggccggggctgatgagctgccccgagccacccctgggggtcactgagggcagggctggcagcacagatgcccctgctcggggcctgagtggggccagtgctgacaggctgtcctctcgtcctctttttcatggcggcggtccttcttcagatgacgacgccggctctgcacccctgtaagttccagctgtgggggtcgggggtcccaaggagcggcctgctgccccaggcctttaaaacacaaaggcagagcccctgggcttcagtattcgggggtcctgggggccggggtgggcaggggtgacttggagagagtgacttgcgggggacaccctctcacccggcccctcgtgccccaggaagagcagcgggcagcaccagaatgacaaaggcaagaacgtccgccagaggaactcttcctgaggcaggtgcggtgggcgggagctcctcctgagccaggtgtggtgggtgggtgggcgggaactcctgagccaggtgtggtgggcgggatctgctagccaggtgtgggctcctgggtcccgcctgtgggtcgctgggaggtgggtccagtctgagcgcccctccctgtccacaggtggcccgaggacgctccctgctccacgtctgcgccgccgccggagtccactcccagtgcttgcaagattccaagttctcacctcttaaagaaaacccaccccgtagattcccatcatacacttccttcttttttaaaaaagttgggttttctccattcaggattctgttccttaggtttttttccttctgaagtgtttcacgagagcccgggagctgctgccctgcggccccgtctgtggctttcagcctctgggtctgagtcatggccgggtgggcggcacagccttctccactggccggagtcagtgccaggtccttgccctttgtggaaagtcacaggtcacacgaggggccccgtgtcctgcctgtctgaagccaatgctgtctggttgcgccatttttgtgcttttatgtttaattttatgagggccacgggtctgtgttcgactcagcctcagggacgactctgacctcttggccacagaggactcacttgcccacaccgagggcgaccccgtcacagcctcaagtcactcccaagccccctccttgtctgtgcatccgggggcagctctggagggggtttgctggggaactggcgccatcgccgggactccagaaccgcagaagcctccccagctcacccctggaggacggccggctctctatagcaccagggctcacgtgggaacccccctcccacccaccgccacaataaagatcgcccccacctccaccctcaccctctcctggctcctgtctgtgcctgacggggttgggttttccgagagcaggtgcaccctgggctctggtggtcacagcaggggtgcgtccagtactgggatttcacatgcgaggacgggtctgctgagaccgcagtgggtgttgggtggctcggggcatgggctggacagggcctgaggctgtcagccggactgggaacttggaaggtggctggggccgaccccgtgcctcagagccacacagaagagagtgggcactgacctgagccttctctgagcctgttactcctctcggcatgttttgggcctgacaaaggctgaggctttctgctgcctgccctgcagctgcctgcacccacccacctgggcgggctgcttgggcaaggttcaggggtggtcctggctgctcctggagagtgggtgtgtgaagctggtgcccagaggctgagggatgcccagcccctgcccgcccagcacacggaacagatgtggttgcagggctggagagcttgggggaccaggagcttagagcgtggaggttgcaagttgcaggaccagtaactgggtctggagggaggtttgcagcggctgtgtcagccctgcaggccgagtgtggcactgggccttctgctggtctgagcgggggtctcagggtggaggtcagcaaaagaggcttagtgggggcttagggagcctgggtgggttcccagagaagctaggaatcagatgggaagatgggaaggcagtgtgtttccgtgttgggcaaatccagcgttttcatgccacggaagccaagaaagggctcacggcctccggcctcacagggctacgcaaagggggagttgaataaacacggtgacgggccccgggcggcagctgctcccggcactgatcctgctgggccagcggtggacttgcagggcccacatccggagctgcccactggtcctcgtgctgcacagccttggaggatctgaggctggctcagggtccctggcagcaactgccctgctaggtgggggctgctgggttccacagctgggccctccctgccggctgccaccaggcggcgctgcacgcccacgctgagtggggcaggccctggagcccctctgcccgggcagcctgacggcccctcctcctcggctgagaccgcagagtcccaggcatcacccactgaaagtgtgctcagtgacctgtgaatagggatgccacgtctgcgtgcagacattgattaggcgcctgtggtatacctggagctggagggtgtgcgtggacaacaggcagaaaggtccagtgggatggaggctgccaacaggacgatggggaaggggcgcgttggggacatcgccgggcacgcggcccaggtgggcccctggctcaggtctccccccacctccctgcctgggctctgtccatctttctgccgcaccctcagccccaggtgtgggcccaccgtgcttgtggacgcctcatgctctgtaccgggtgggaggtgtgggagttacaggtcagggcagccttgggagacgggcaggtttcctggggtgcttaccggcagatggggcgcctgggtccgtgcagggtcgtccgcccgagaaagcagcccctcacccctgggcactaacttcatcttttttctttgcacacagaaacgtaaacctgattcacaaaagtataaccactcagcatgtagctttgtacacctgccctcagcatttagtgtcctcgttcatccaacaagcatctaataagcactggggtacgcagtggtgggtgtccgccccgtcactgggtgtccagcgtggggtgcggaggtggatgtccaccccgtcggtgggtgcccggcgcggaggggtgcggaggtggatgtccgccccgtcggtgggtgcccggcgcggaggggtgcggaggtggatgtccgccccgtcggtgggtgcccggcgcggaggggtgcggaggtggatgtccgccccgtcggtgggtgcccagcccgatgtccaccccgtccctgggtgctcttggtggcaactcgctgaagcctgcctcggtttccccagaggtgagatggggaagtcaccaccgccaggtcatgagatgagattagatcatccttgccaagtatcaggaaaaggcctcagggctcccctgggaaccttggggtctcaggagtcccagctcccagtgggcaggggtagggttggggcggccagaggaacaagtgtttgttcatgggctggaccccaccgcggccccaaagctgggctgcctattcctgtcctgggcaaattggcctctcctccctcttaccccccaccccagtgggagcccacaaggacagggcctgccccatcccctccactctgggctgtggctctaagcagcacgtcccactctaggggctcagggcagggacagtgactcatccaaggtcccgccgtggagggcagagctgaaggagtgagaaggagctgctgacatggaactggcccgtgcggaaagactttggtcttccccatatttttcaccaggctcctggggcaaggtgagcccagcagggagaaggaaacttgtgtgaatcccaggccagcaggactgggggccctgctctcatcgcagacgctgcagacacggaggcctggggcaggggccctcagggctgtgctcctgcagagatggagcttgcgtgtgtggctgagactgggatgccaccccctttcctaagcctctgtttcctccgctgtaaatgtgggcccaggcctgccatgcacagctcatctctttaattttcttttttttttttgagacaagggtctcattctgtcacccaggctgtttgtgcagtggtgttgatctcggctcgctgcagcctcgacctcctgggctcaagtgatcctcccacctcagcctcccaagaacctgggaccacagatgacacgcacccctccccctggctcgtttagtatttattgagtcaaactgcagattttccaggcgggctcagtgcctgccctggcctgattttgtcttcctggtcttaaactgcttttcactccaaaggccccaaaattgtataagctttcagggcgtgcgacctggacctgtcctgactaagtgggaaatgtaggtccgaggttggtaaatccggtaaacaatgccgagagaggctgcagggggcggggagatggggaagaccctggggagggaatggcagggcctggggaggttcagcgaggaggggtctgggagttcggggtccagtgacccaggcacacaaaggccagactcgggcggaggagtacaagctgctggagggacccgggctttcttccaaaggcactgggagctgtgagtggttttaggccacagaccgatgtgactgactgaggggccaggccctggggctccatgctccctacacaagccaggtgcggtcccacctcaggaccctcgcacaggctatgccgcctgcccagagcttcctgcagcttcccgggccgcaccccctccttcaggccttctcccagcacctggccccctccccaccctgagtgtttggacaatgctcaccaccttctgctggacagtatcttacttgctactcataaggttgactgtgatacccagctttctcccctggctggctctctgagtcagctgtactggc[136 bp omitted]ccaggttcaagcgattctcctgcctcatcctcctgagtagctgagattacaggcatgtgccaccacatccggctaatttttatattttttattagaaacagggtttt[145 bp omitted]caagcgctggagtgcaatggtgtgatctcagctcactgcaccatctggctcctgagttcaagcgactctcctgcctcagcctcccaagtagctgggattacaggcgcccaccaccacgcctggctaatttttgtatttttagtagagatggggtttcaccatgttggccaggctggtctcaatctttaaatattttttaaattaaaataaatgagcatggctgggggggtggctcacacttgtaattccagcactttgggaggccgaggcgggtgggtcacctgaggtcagcagttggagaccagcctggcccaacatggcgaaaccctgtctctactaaaaatacaataattagccgagcgtggtggcaggcgcctgtaatcccagctactccggaggctgaggcaggagaatcgcttaaacccgggagtcggaggttgcagtgagccgaggtcacgtcactgcactccagcctgggcggcgacagagcgagactccaactcaaaaataaataaatacataaataaacagataaatacagagtactccggcctgggcaaggggtcagagtgagtgtgccgaggccagggagggtccccgtgcacactgacaggcgctggcctgggtaagcctgtgggctgcagagccgtcgccaggatctggtgacaaggaccccgagccacagcctcccttgtgacttgcgggttctgccggcgcctgcaggaggcgtctttctgcttctcccactgccaggcatgggcggttctcgtgccgtgcgggtcccgcctcctccctgctcccagccgcgagccctggggctctggcgacctgcccggcctgacatcttcccagggtgaacataaaagaacccccttcagctggagcacgcatctgcctcggggcgggccacagcctggcactgccaactgtgccgcccgcccggcctctcccgcaccaccttgggacaaacagctgtcctgcccgcctatgcggaggtggccggcggggccggcgtgggggcgcagggatccccagggtgtggggcagccaggccgaggcgagagacacggtcgggctcagcccatccactgtcagccgggcacatgctggccctccctcaagtaccactgagtgcctcctgggtgtaggaagagggccatctctgccccggtggcctcgaggtgcagatgggtggggggcacccggcacacgggacatcgtggctgagaggacgtcaggccaggtgccaggagggtcccaggagggcctcctgcctccaggtggggatgttcagcctccacttcttcgagtgtgactgtctgtctcctctctctcacttgccagcttcctcacctgccccctcccggctgtctggtgggctgggtggctagggacagaggcctcatgtcacctggcaccaagcagcacccacgcccagccggcttcggcccagaagcagagccttgggaagcacctgtctcagagctggggactggaggcactgggggcacagctgcacccggagtccgaggggtcggggaaaggaggcaaccccggggcagggggctctggtacccgtgcgaaggcgctagtgggctttgggtctccctgtgaccccaatctaaagcccaccagacctagaggagacccccgccgcacggctccccagggcactgtttgaggggtgggtgggaaccccacaccctcgggtggcttttccagttttccttgtctggctgggcttggcctcagtttcctcaaatgcagaccagggagaggagtgcctgagtctcccagaacggcgcccaagccggcctgcccctccccacgcactcaagggtctctgtccagggcccacaggcgacccagcaagggctcctgtgacctttagaaacaccctttcgtcgtggaagtcttcaaacctcacagaaagcaaggaggcgctggccgtggcggcctctcccgtctcccaggcccgcgtccaccctccccgcgccggtgccctccggacagaggtggaagccgcggcgcaggagaggcggctccggccgggcagcggggcccggtgaccttgggcgcgtccttacacgtcgcgggcctcagtttcccctcctggggagaggcccgcgcggggctccgaggcctcgggccgcgtgaccttggggcgcccccgaccccgcggcccgagtttcccggcgccgagcggaggcggcgcgcggggagggggcgcagccgaggcgggtctcccgcccccgcccctcccccgcccctcccccgccgcgaggctccgccccccgcggctccgccccgccccgcccccgcctcccccctccctcgggctccggccggcggcggcggcggcggctccgctccgcactgcccggcgccgcctcgccatggacgcgcgcgggggcggcgggcggcccggggagagcccgggcgcgacccccgcgccggggccgccgccgccgccgccgcccgcgcccccccaacagcagccgccgccgccgccgccgcccgcgccccccccgggccccgggcccgcgcccccccagcacccgccccgggccgaggcgttgcccccggaggcggcggatgagggcggcccgcggggccggctccgcagccgcgacagctcgtgcggccgccccggcaccccgggcgcggcgagcacggccaagggcagcccgaacggcgagtgcgggcgcggcgagccgcagtgcagccccgcggggcccgagggcccggcgcgggggcccaaggtgtcgttctcgtgccgcggggcggcctcggggcccgcgccggggccggggccggcggaggaggcgggcagcgaggaggcgggcccggcgggggagccgcgcggcagccaggccagcttcatgcagcgccagttcggcgcgctcctgcagccgggcgtcaacaagttctcgctgcggatgttcggcagccagaaggccgtggagcgcgagcaggagcgcgtcaagtcggcgggggcctggatcatccacccgtacagcgacttcaggtaccgcctccgggagggccggtcggcgcgagggggcccggggagccgggcgcgcggggagccgtccttggagcgcctggggagggcggggcggcgcgccgggccggtgacctcggggctcctcggtgacctcgggcgtgtccgggacccgccccggagtgaccccggcgcgcgaggctccgcctctgggggggctccccgggtgaccgcggagcgcccccctcccacgcaccccgacatcctccgccctgcggcgcggcgggtggggtgggccgcagggccagggtctgagcgcagaggggcagagaggacgaatagaggggaacgtgggccccagagaggcggcggagcgggagggaggaggaacgaagggcgcccgggaaggacgcgccccagggaggccgggggagagggggttaagcggctcccacggcgtccacccgcgccccgcctgcgaggaggcgcgcccggggccgcgggcctggaaagcgtgcgggtccccaggctgtgtccccgggagccgctccacccgagccgcgggcggtgcgcgcatgcggcggtgggtgtgtagacgccgctgtggatccagccggctaatgcgtggaaggctcggagcagggccggcgcggggccaccgccactgatgtttgcggtcgtggttcctgggctgtgcgtgctgtggccggagagcgagaccggcgcgtgtccccgtgggctgtgtgtgaacaggggcccgtgaccgcggcggggttcccggggcgcgagcctgtggccggagaggtgtgtctccaggagtgtgtttgcgtggtggtcgcgggcgtgtgcgcctccggtgggtttattttggtgggacgtgtggtttgtgtgtgttgggaccaggtggcgggcgtgcgcgtgtacgcccggggccggtgtgcaccggtgggcagtagtgtgagccgcaggcaggtctcacacacgcgaccatggagggatgcgtgtgtgtttgtgtatccacgagtggggtgtgaggtggggtgtggagggtgcaggtggagggtgtaggtggggcccgccgggctagcgaggccgggcgcgcgggacgggcgcggtttcagcaccacggacagcgcgccggacctgggaagcctgcggttttcccgcctgtctctcctcctccaggcctgggcgccccaggacagcccccacggaccctggacccccggaactgggcagggaggctgtggggttctctcttcccctggattctctgcacccctagtgcttgactggagaaactgaggcctggggcacatgcgtcctggacagagcctggaggaaggccctggaatcctcctcccaccccaggccttcctgagaggtgaatacagctttgaccagaagcctggatttcgagacaggccaggggtgggaggagccccgaaatccccagaggggctgtgtccggcccctcccaccctgcctctgtgccccaccgggagagcttggtcagcatctgggctctggcctgcgaaatgtggacagtgagcgggaaggactggacttccagggctgctggtcggcctggccccacttccagtcgggcagtggcaccccctgaccggagagggacgcggtggagagggagctgtagaacgtgcccactcccctccgtcccctccagcatgaccttcgacagagatgggtgcaccgcagcgtgggggctggcaggtggaggcccacaccagccactccctcccctgggcagctccagcgaccccctggctgcagaggggcggtcggtggcctggggggcaggtgggcagatggctgatcccggggcttggggggaaggccggtggtaggagtgaagccctctcatccttccaccctccttgggcgtggtcgcctggaggcctgggcaggctgtggccccgctctgtgctctgaggcatagagggctcagaggcccctgtgtggaccaagtgcagccccaccccggcagatgagtgttgaagtggaactgagcaggcagggaatggggttagcggggcctgtcttcgggactaggggagtcacggcagtcagattttaaaaaaggatttcgatgttgccaagctgggtgcacggggcccctaggaccctccccaggcttgggacctgtgccagtgtggaatcagtgtggaaaaagacccccaagaatatctcaaaagctccctaagcaggcggccggaccctgctgtggagggtgttttggggcagcccacagcaagcgaaggggcctctacgtttgcagctgactcaggagcctggccccaactggcttcgggcccaaggcctcctgtgcctggctgggtgtcttgggtcctcgctgggcccctctgcctcagtttccccaattgcacggtggggatggtatgagggagaaggatggggtctttcacagccttgccagtgtctcagcctcacgtctcacactctcttcacctccccttcctgctgagagagtgctgtgctccttgcccagcctgtgccccccaggcacgccctcaccccggttcttcctcgctgcccagctgtctccgccacgcccaagtccaccctgctcccgtgctcggaagtggcctctttcacgccccacgtcccagtcccagtatacagcaggtgccacatatttgctgaattttctgaggggcagagcatgggtcctgggctgacgtgggtccagatttcggctctcaggcctgggcggctggcccctttggaagtgcagttggtgccagggtgcagcggctcacgcctgagatcccagcactttgggaggctgaggcgggcggatcacctgaggtcaggagttcgagagcagcctggccaacatggtgagatgatcccgtctctactaaaaatgcaaaaattagctgggcatcgtgacgagcgcctgtaatcccagctactcgggaggctgaggcaggagaatcacttgaatccaggaggcagaggttgcagtgagccgagatcgcgctgctgcactccagcctggctgacagagtgggacttggtctcaaaaaaaaagaaaaggaagaagaagtgcagttggtctattgctgaagtctctggggctgtgggtggctctacaccccggcctgacgtctgaaagtccccagaggcatgctgggcgcttccctggggtgctggtggaagagcaagttcaaggacccaagttcaaggttttgggttccagaggctcaagttcccttccttgtaggtgatcacggttggtgcctgaattggaacaggcgtgaaaaccaagaaggaaggggtttggccttatgcaacccccagggcttcggcagggtcttctgtgcctcccagagcaaaattaggtcaaaaataagtatagttcattcctactcccttcaccccagccgccgctgattctaaaggccacacaggtccacttgggaaagcctgagtcgtgcaaaggagggtgtctccgcaggagaggggcaggggctggaggtctctgcacgagaagggctggggctggagggtgtctccgcaggagaggggctggggctggaggggacacgaaggcccagggaggggcggtctgaggaggtcgcgttctccgaagcttgctgtcatccaccctccctgcccccggtgtcaccgagggggctgggcagacctggcggggtggagacctgggcagatccggggtttgtgccctgggagctctggggggcacagggcaggtgtcgggtggagagaggctggcggcttcctgactgccctcggtccagttccagggctaagtgccctgtggccgccctgccgtctcctgctgctgctgacttgcaggtctgtgtttctgaattgtcttcagctggggaggccccgtgtgaggggagacagacgagatgctccccaaagccaggatctgttatgtcccctggggtccccgagaggactggtcggggaggagctgctccaagaccccaccaggacaggcggcccctgggccccgcctcagatggctgagtgggtcagcgggagatcagcctgggggtgcagctctgcaaatccgcagtgatgaatcccagcattagggcgtgggaataaaccccccattatcctggggggatggccccgggggcagggcgaggcgagggtttgtctggctctggtcacggcaggaaggcccagcgtgtgcaggatggtggggtgtgcatggacccatatcccaggtggcggtggcctgccctctggtctgcgtggaggggtcaggggtcggggtggccaaggcctccccgctctcttcagggccttccctatgttccctgctcgaaaacggacatctttgtccaggcactgtggctcatgcctgtaatgccagtactttgggaggcggaggcgggaggatcgcttgagcccaggagttcgagaccagcctgggcaacatagcaagacccccatctctacaaaaagttaaaaaattagccaggcgtggtggcgtgcacctgtagtcccagctactctggaggctgaggcgggaggatcacctgagcccaggaggttgaggctgcagtgagctatgatcgtgccactgcactccggcccgggaaacagagtgagaccctgtctcaaaaaaataaaaaaaacctaaaaacccacatattcaagtcaccttcatcagccccccactcacttgggccgggccctgcctcaccccccaccccacggttcagcctcgcaccctgtgcgctggccgcctctctcctgccagatgcctccccgtccccctttctggcctcccggctgtcagcatgggcctctccagacatcggtccttctttccctgtcacctctacctcctccctggctccagccctccccagtcatgtcccctggtcccgaggccgcccaccggccttgaagggaacccggagcatcaacctccgcacctgctgcccctcttcagccactgccctcccctcaccatctcatccacccacacgccacctcctccaaggagccctcccacctgcctggggctgacaggcccatcccatgtgtctgtcttggggctgggcctgtgtggtcatcgtgtgccccggcgcccggcgagagttcggtgaacatctgccccgtcgggatcacccgggaacccgagatctcccccacccgtagcagctccctttcttaatcctgggcacctgccacggatctggccatgactccacagctgagagtgccgtctcctaatcccccggcccgaggctctcccttaatcaccgacctccggcccctaatcctctcccggattgtccccatctgtaaatcctggacggcctccggcctgaggctgggctcctgcggggagggcctggctgccctcgcccgttccccaacccgggactcaggctccagcaggggctgaagaccccctgggcaggccctcccctgggatccaaggggctgagggtcctgggccttctgttgccaggagacctggtgtcctcgtggggtttgggagccgggtcggcggcctcctcccccaagcttcatccagccctggagagacggggacctgcgtcggctttgggaacttcaggggaagaaccctgagctcggggcaggagaatgacatggtctgtctgggttcccatcccactgtttcacttatggctggaggagcctcagtttccgtgtcagagccgagagagaggctgggcggctgttggaggagggctgagctcacatcggtgtcaggtgccgggggccccactgaagccactctggagtgagagggggtccgaggcttcttccggtcccccaggtgtgagagctgaggccggaaggtttccccagggacccagcctcatcccggcctccggagctggtctccctccctgcctgcgagggccaagctggacaaagtggcaggacccccgcgtttccgaggaaggggccctcgtagaggcctcactgttacctgtcggggatgggttttaaatacaggatttaatgatggtcactgatgtttctgtgacagctgaggggggcctgtccctgctcagcactggggttggacaaggagggcacagggtgcccggggagtgctggggcccgcctgggtccctatggtggccggatggggaaagggctgccggacgcggctgcacagagtgtgagggggagtggggttgggctttgggccttcccctgaccccaggtcccctctctggggtcctgtcttctggagctgcctccccctccccagggcgagaggcaggagagggtctcccaaggtcactcagtctagtgttgggcaaggagagggttggggtggagagggttggggtgcaccggcagagacagtgacgccctgcagggctctggggtcccctctgccccaggcctcggtttccccttggtaggggacatgcgtgggcgcccttcttccttctgacctctggctggtgacgacgagggttgcggccccaagccctgcttggaggcattgtggttggaacgggcaggcccagccccacaagggaccctcagggtggccaccccacctgtcccttctcctaggcccctctgctctgacccccgtaatccccaggaatactgccctgctgggcaagatgggctgaggagtcctttctggggacacaggagcagaaggctcaagggaggtggtttccagacagtgtgggccgtggataagaggacagtcctggggtctcatcctgcagtcccacttccatcagaggggaggtgtggtacctgcccccagctcaccccaagaataaagggggagaatgtctgttaatcatcacctggaaaggaggccttcatgttatatggccgtttaaaaccaggtaccccttggcggtttctaggtcctcctggtggtttctaggtctccttggcggtttctaggtcccccttgacagtttctaggtctccttggtggtttctaggtcttcctggtggtttgtagatctccttggcggtttctaggtcctcctggtggtttctaggtcccccttggtggtttctaggtcctcctcgtggtttctaggtctccttggcggtttctaggtcccccttgacagtttctaggtctccttggtggtttctaggtcttcctggtggtttctaggtcctcctggtggtttctaggtcctcctggtggtttctaggtcccccttggtggtttctaggccctcctggtggtttctaggtctccttggcagtttctaggtcctcctggtggtttctaggtctccttggcggtttctaggtctccttggcagtttctaggtcccccttggtggtctctggagccccctgggagtttctcctcgcccctcgtgggggaggtttctaggccctgtggccttctcaactgctctttcctgctggttttgtcccaagactggtgctcgaaggtgggaggcaggtctcaatccagagggtgaggctggggctgagctccacggtgagccccctcggggctgaggggcagggggccagcggcaggcgggtggcatcccctcagcccactcggtgctggggccctgggggtctcgttgctgagcagatgtgtcggactgggggcctgagccctcatgtcctgtctagactcagggaaaggaaggccttaaatttctagtccttttagtcatttgatttcacccttcaagcttgtgaggggacccctccccaccccgagatcaagtcagccttttttttttttgagacagagtctcactctgtcacccaggctggagtgcaatggtgcagttttggctcactgcagcctcgacttcatgggctcgagcaatcctcctacctcagcctcccaagtagctgggtccacaggtgcgcaccaccacgctggctaatttttgtattttttgtagagacgggatctcactatcttgcccaggctggtcctgaactcctgagcttctgtgatcctttagtcttggcctcccaaggtgctgg[284 bp omitted]agcctccttaagccctggaattacaggcgtgagccaccgtgcccagcctgagtcagcccttctctaggttttatccccagcctgggtggttcttggggggtgtcccgaaggctcagcccctccccatcccgaggcggtggatgcttggaagaagagactgaggttctcaggggctgcaggaacttgtccaaggtcactgtgccagcaggcgggtgccagcccaggtctggctgatgccaccacgatgtgagtcgctgggtcccttccagcgtttggctcttgcagaccgagctgctgtgaacattttggtacaaatggctttttaatttttttctcttccttttggaccgtttcctcgggatcatttccccgaagtggagcgtctgggtcaccccgcagacgtggtgttaacagcttttccctcgaggagccgtccagaagcaaggagccgactttcggcggctcctgaaacaaaggtcccggcggccacgccagcgatgagctcccaggtttttctttattggtgttaactttggggagtccctccagtccctcagcatctcctccgaaaggatgtggggaccccggccatgata[226 bp omitted]ggagggtgaggcaagagaatggtgtgaaccctggaggcggagcttgcagtgagccgagattgtgccatcgcactccagcctgggcgacagagtgagactctgtctcaaaaaagaaaacctcaagaactaagaaggctgagttggtacagggatgggaaggggtcccgtgtgtgtgtgtgtgtgtgtgtgtgtgtgtgtgtgtgtgtgtgtgtgtgtcagagggtctcatgttacccaggctggtcttgaactcctgggctcaagcgatcctcctacctcagcctcccaaaatgttggaattataggcatgagccagtgtgtttggcctagcccccagtgttaatggcaaaatcctatgaatctttgtgctggaaattcaagaccctcccttgtctgagtcaggcacacgcaggccatgtgggctcagaccccagtctggaacctccccttcagcaagagcccttggccccagagcccagaggtttttgttttgttgtgttttgttctttgagacagagtctcgctctgttgccccggctggaatgcagtggcacgatctcggctcactgcaacctccacctcccgggttcaaacaattcacctgcttcagcgtcccgagtagctggtactacaggcgcccgccaccacgcccggctaatttttgtattattattttttgagatggggtctcactctgttgccaggctggagtgccatggcgtgatctcagctcactgcaacctccgcctcactggttcaagcgattctcctgcctcagcctcccgagtagctgggactacaggcacgtgccatcatgcccagccaatttttttttttgtattttttgtagagctggggtttcactctgttggccaggctggtcctgatctcttgacctcatgatgcgaccacctttgcctcccagagtgctgggattacagacgtgagccaccacacccggcctaatttctgtatttttagtagagacggggtttcaccatattggccaggctggtctcaaacccctgacctcaagtgatccgcctgccttggcctcccaaagtgctgggaacacaggcgtgagccaccgcacccagcaggcttttttcttttatcagttttccaattagccattgtaaaacctatcaatcagtgtcattaagcccattcttgctgttgtacaaccgtcaccactatccatagtccatacctttctcattcccccggacagaaaccgcaccccgcacatgccacttctcacccctccaacccccggcccccggcacccatgcatccccttcctgtctctggattggcctgtcctggacatttcgtagaaatgggctcacacggccgggcgcagtggctcaggccggtaatccccacactttgcgaggcctaggcagaaggatcatgaggtcagggtttcgagaccagcctgaccaacatggtgaaaccctgtctctactaaaaatacaaaaatgagccaggagtggtggctcatgcctgtaatcccagctactcaggaggctgaggcaggagaatcgcttgaacttgggaggcggaggtggcagtgagccgagatggtgccactgcactccagcctgggcgacagggtgagactccgtctcggaaaaaaaaagaaatggcttctctcactgaacgtgacgtcctcaaggggcatctgcgccgtggcctgggtcagagcctcactccttttcgtggctgagtcgtgttccatggtggacgggtcgcgccgtgtttgtccctccgtttggtgatgggcacctgggctgcctctgcctttttgctactgtggatcgagctggtgtgaacacagcggagtggtcgtcgtccgcagtcgagctggtgtgaacacggtggggtggttgtcgtccgcaatcaagctggtgtgaacacggcggggtgctcgtccgtccttgttttcatttctttgggtataatctcggggcagggagaggctggtaattttatgtctttttaaggagccacccgtgtttgctccgagtcgttttgattttcattttctcgatagcgaaagggttgggcatctgtccagtagccatttgctgaccctctatgacctcctgtgtggacgcggcactcccagcaccgtgtctggcccgccatacgcaggccctgaaccgacaggaccttttctgccagagcttcccagggagagttttgggatccaccttggggacttggactctggccgggtgtatctgggagtggaaacgccctctggtctcttgtccacgggtatttatcatacggaacgtccgaatggtgccaagtccggctcggccgttcctcccaccctctcggcctcccctgtggcgccagccccgtctctgcttggcttccctccctcctgtgtggacgccccacttcctcccctctcctcctgcgtggacgccccactccctcctctctcctcctgcgtggacgccccacttcctcctctcctgcgtggacgccccactccctcctctctcctcctgcgtggacgccccactccctcctctctcctcctgcgtggacgccccactccctcctctctcctcctgcgtggacgccccactccctcctctctcctcctgcgtggacgccccactccctcctctctcctcctgcgtggacgccccacttcctcctctcctgcgtggacgccccactccctcctctctcctcctgcgtggacgccccacttcctcctctctcctcctgcgtggacgccccacttcctctggaaatgcagccggtgctgccctggttcagtcttcctgtggcccctgtggaggctcccgcttctcagtaaggcatctggggccctcacctcccggcgtgagctgagcacggttcatttcccaccctggcttcccgccttcgctctccctgtgcgcgccgccctgcctcgccctgctgcttcccagtgcccctctgcaccccggctcctctctgctcctctgctgtcctgtcctgtctatttttttaacgccaaccttgtgccaggcacattgtccctctctggtcatgtgaagcacttaatctattttgagccacctcttgggccttgtgaggtctcctgcatcttcaaggacacggggtcaaagttgggcctgaggaagggacctgggctagggcagcgcagtgggcgttgggctccctcggggctgggtggccttcctggggtgggagcctggtcccgagggaggagtgcccagggcttgtcctgcaggcgcctggggggaaggcaccggcctgagctgtgggcaccctcgtcccccagggaggaatgcccggggctggtcctgcaggcgcctggggggaaggcaccggcctgaggtgtgggcaccctcgccccccagggaggaatgcccggggctggtcccataggtgcctgggggaaggcaccagcttgaggtgtgggtgcccctcgtcccacagggaagagggcccggggctggtcccataggtgcctgggggaatgcaccagcctgagctgtgggcaccctcgccccccagggaggaatgcccggggctggtcccataggtgcctggggggaaggcaccagcctgaggtgtgggcaccctcgccccccagggaggaatgcccggggctggtcccataggtgcctgggggaaggcaccagcctgaggtgtgggtgcccctcgtcccacagggaagagggcccggggctggtcccgcaggctcctcggaggaggcactggctcgaggtgtgggcgcccctcgtcccccaaggaagagtgcccggggctggtcccgcaggtgccccggggaggcaccggcctgaggtgtgggcaccctcgcccccaggttctactgggacttcaccatgctgctgttcatggtgggaaacctcatcatcatcccagtgggcatcaccttcttcaaggatgagaccactgccccgtggatcgtgttcaacgtggtctcggacaccttcttcctcatggacctggtgttgaacttccgcaccggcattgtgatcgaggacaacacggagatcatcctggaccccgagaagatcaagaagaagtatctgcgcacgtggttcgtggtggacttcgtgtcctccatccccgtggactacatcttccttatcgtggagaagggcattgactccgaggtctacaagacggcacgcgccctgcgcatcgtgcgcttcaccaagatcctcagcctcctgcggctgctgcgcctctcacgcctgatccgctacatccatcagtgggaggaggtgaggtggggcgggggcggggccaaggcagcaggggcggggctataatggtgcatgggcggggccaaggcagcaggggcggggctataatggtgcatgggtggggccaaggcagcaggggtggggctatgagagatctgggtggggtcaaggccccaggggtggggctatgggagatctgggtggggtcaaggccccagggatggggctatgagagatctgagtggggtcaaggccccagggatggggctatgagagatctgggtggggtcaaggccccaggggtggggctatgggagatctgggtggggtcaaggccccagggatggggctatgagagatctgggtggggtcaaggccccaggggtggggctatgagggtgcaggggtggagctacaatggtgcagtggtagagccaagacagcaggggtggggctatcaggttgctgagcagggtcgaggcagcaggggcagggctatgatgctgctggggtggagtcaagcagcaggggtggggccgtgatatctgggtggggtcaaggagcaggggcagggctgtgagggtgctgggcggggtcaaggcatcaggggcggggctatgagggttgtgctgagcggggtcagacatccgagtggagatatgagggttgtgctgggcggggtcaggcagcaagggcgggactatgagggttgtgctgggcggggtcaggcagcaggggcggggcaatgcgggttttgctggggcagggccagacatcaggggtggggatatgagggttgtgctggggcggtgtcagacatcaggggtggggagctgtggatttggggggtgtcctagggcgggggctgtggatttgggggggtcctgcagtgaaggctgtagaggtgggcggggtcctggggtgggggctgtgggtttggagggcgggggtcccggggcagggctgcagggtggggcgggggtcctgtgcggggccttggatttgggggagggggccaggagctcccgcagtgggggcgcacggggctggggctctgaaggtgggggccgggggtcagcgggtagggtgggctcacggcgccttcctgcagatcttccacatgacctatgacctggccagcgcggtgatgaggatctgcaatctcatcagcatgatgctgctgctctgccactgggacggctgcctgcagttcctggtgcctatgctgcaggacttcccgcgcaactgctgggtgtccatcaatggcatggtggtgagcgccgcgggccctgacggagggggagacgcaggctcccatacagaggggggacccaggcccccttatcccgcttacagagggttgaacccaagcctttcagaggtggggacccaggcgcccccttatggaggggaggactcgggcccttacagaggtggggacccaggcgcccccttatggaggggaggactcgggccctttcagaggcggggacccaggcgcccccttatggaggggaggactcgggcccttacagaggtggggacccaggcgcccccttatggaggggaggactcgggccctttcagaggtggggacccaggcgcccccttatggaggggaggactcgggccctttcagaggtggggacccaggcgcccccttatggaggggaggactcgggcccttacagaggtggggacccaggcgcccccttatggaggggaggactcgggcccttacagaggtggggacccaggcgcccccttatggaggggaggactcgggcccttacagaggtggggacccaggcgcccccttatggagggaaggactcgggcccttacagaggcggggacccaggccgccttacagagggagagacacaggcccttcaggggtggggacaagacccccttacacgggaggactcaggcctctttacagagggggacccaggactgcagccccggcactggccccttaatgtccctgggggtctgaaacagccacttggaacctttcaggcctgggatcatccgtggagagaagctgagtgtggttatgatgagtcctgtcacccagacatctgcttagcgcgttttccaatggatttcccttttaattaacccacattaattattattattttatttacttatttttttttgagactgagtttcactctgtcgcccaggctggagtgcagtggcacgatctcggcttaccacaaaccccacctcccagggttcaagggattctctcgcctcagcctcccgagtagctgggactacaggcgcccgccaccacacctggataattttcgtacttttagtagagacggggtctcgccatgttggtcaggctggtctcgaactcctgacctcaggtgatccgcctgcctcggcctcccaaagtgttgggattacaggcgtgagccaccgcgcccggcctggttggatcccttgagcccagaagttgaggctgcagtgagccatgattgcaccactgcactccagcctgggtcacagagcaagacctgatctctaacaactaaagaaaaatttacaacatggccctgaattgggaaagtggtatcaccatgccaaagaaataataaatgggccaggcatggctgctcatgcctgtaatcccagcactttgggaggctgaggcaggcggatcacctgaggtcaggagtttgagaccagcctgaccaacatgctgaaaccccgtctctactaaaaataaaaaattagccaggcgtggtggcgcgcacctgtaattccagctactgtagaggctgaggcaggagaatcgcttgaacccgggagcagaggttgcagcgagctgagatcacaccattgcactccagcctgggcaacagagccagactttgt[144 bp omitted]gagaaaccccgtctctactaaaaatacaaaactagcttggcgtggtggcgcatgcctgtaatcccagctacttgagaggccaaggcaggagaatcgcttgaacccgggagcggaggctgccgtgagccaagatcgtgccactgcactccagcctgggcgacaagagcgaaactccgtcaaaaaagaaggaataataaatgaagttaggtcccagatactccttgcttcctagctgagatgtgctgactgttaagaagggttagttatgggagccctcggccgctacagtcaggttagtggccagtgagcctttgtccctgcctggggagtgctgtgccccagcgtccagccacatatgggacttgggatgtgtttggtttggacacagagcaggtgggcattgatggggtcaggagctacagagggaagacccgccagtgcccctccccagagcctggcacagctgcccaggctgaggcagcccattgtctggctgccacccgcacatgcggtcccatttcctgaacagagccccgcggctcccctttcccggccgggtcagctgaggacttggtgcggcaggacctcctgggccggcctggtgtctctgcccgccctgcccctctgctctggcccagatgctccctggaacttttgccccctcttgacctcacagatgctctgatctcagaggctgcaaaaggcgggacccagactctcgcccttggggtctcagtttccccaggagtgaagcgggcaggtagaatcagccctggccctcctgccaactcactgtgacaagtgtgcaaaccatgtcatctacctgggtctccatttctcttggttacctctgaacatggggagctcaccacctccagtgcttggcagagggtgggcgctgggcccttgaggaccgagggctcctggggcgtgagcacctgcccaccaccgcccctcctgctggccttgcagaaccactcgtggagtgaactgtactccttcgcactcttcaaggccatgagccacatgctgtgcatcgggtacggccggcaggcgcccgagagcatgacggacatctggctgaccatgctcagcatgattgtgggtgccacctgctacgccatgttcatcggccacgccactgccctcatccagtcgctggactcctcgcggcgccagtaccaggagaaggtctgagggaggcgggccccggcctgggttctgatgggggaggcgggcctggatctggggtctgagagagagtcaggccaggccctggggtctgatggagggaggcaggcccggtcctggggtctgaggctggagggaggccttgccctggggtctgagggcggaggtagtccttgtcccggggtctgaggggaggggcgggcccggccccggggtctgaggggagaggcagtctcagcccttcactcagcttcaagtggcgcgctcagggcagagaccgcgtgatggggagcaggggaccctgggggtctgtggctgtgattaggaggagaaacggccggtggtgagaggttctctgaccctgtgacagggagggaggtccagagcctggagatggacgtggggcgggggctggggaggggatgcaggctgggcaggaaggggtgagttgggatcagggcaggacagggtcagtctttggacatcgggaagcccccgggctgaaggggcattgccaggaggctgggcccacctgggggtctctaggccggctcaggatggggctgggttagggaagggcctggcggggtctgagaggcctggggttgcttcaggacacgccggtggccggcagtcagggccaggcttcagggagagcaaggctgccccactgctcagatgcggcctctggcctgcagcgtccattgggttaatcctaggcttggcagtggaggggacacgggggagctgggaggggtggagggagattaggattggccccattggcagcccctggagttgggcctcatgcaccactctgtgcctcagtttccccatgttaggcggctggctggtcctggctgggagccaagtgcccccctctcccgcgccccgagcagtggctggctgggtcagctgggccccgtgccaggcgccctgctgtccggaagccacgggcctcacacccaaacataagctggtgccaccacccgcccgccgtcacgggttccgctgagctcagggcagctgcggccgggcggggctggggcggaagtgaggctggagctgccggggggcaccgtcctggggacagcagggcctggcacccccgcccagcacccacgctcccttccctgctcaggaggggctgacccgatggtttctggaaagatcatcagggaagggccagagcccccgggaagggggtcctgtgtgtcagggtacctggggcctctcctcgtagagtcaggtgcccacccattcctcagggatagggttgctagataaagttcagggcacccggcctggtgcagtggctcctgcctgtaatcccggcactctgggaggccgagacaggccgatcgcctgaggtcaggagtttaagaccagcctgagcaacacggcgagacctcatcgctacaaaaaattaaaaaattagcagggcagggtggtgcacacctgtaatccccactactcaggaggccgaggtgggaggatcccttgagcccaggagttcaagaccagcctgtgcaatatggcgagacctcatctccacaaaaaataaaagaatcagccaggcgtggtggcgcacacctgcagtccctgctactcaggaggctgaggtgggaggattgcttgagcccataggcggaggctgcagtgagctgtgattgcaccactgcactccagcgtgggccacagagcgagacagtgtctcagaaaaaaaaaatggaatttatcattgaaacgaattcaactttgatttaaatagaagcatgtttatttgctcttgttgaatctggccgcccctgtgtgtggcggaggcctgtctccccgctgtgggcgggggctttgtctgacccagccctgaccccccacagtacaagcaggtgtgaaggcctatctccccgccacaggccggggggctgtctgacccacaagcaggtgcccgtgtgcccgctgcaggctgggggcggtgtctgacccagcctcgcctccccacagtacaagcaggtgcccctgtgcccgctgcaggccgggggcggtgtctgacccagcctcgcctcctccccacagtacaagcaggtggagcagtacatgtccttccacaagctgccagctgacttccgccagaagatccacgactactatgagcaccgttaccagggcaagatgtttgacgaggacagcatcctgggcgagctcaacgggcccctgcgggaggtgaggcgggcgccgggcgggcgggaggcagcctccggtacagggccggcctccctctcctggagcccaggagccggtccctgagggaggcgaggtgcctaggctgcagcaggagggactcgagctagacctgcgtacacaccctcccctccccgccccgtgagcctctgcacccccaggacccccgccacccccgccttgcttcccgctgcccccttagcagaactgcctgggtctgtgcctgacagggcggggcagaagcagggcagggggtggggagggaggagccgcagaggccccgctgagcaccaggtcctgggggcactgaggctgattggagcgggtttaactcccagctctgttccggtagcctgagtgaccctgggcaagtttcccagggttgcgggaacaaatacccacaggctgagtggcttgaacagcggagattcggcctcccaccgtcctggaggccggaagcccaacatcaaggcgtgggccgggccgtgctacccccccggagcccctggggaggatccttcctgcctcttccggcgtctggggctccaggcgcccttggcttgcagattgatctccctgatctctgcctccatctgctcacagccttctcccctgtgtgtctctgtctcttcttgtaaattcatccgtcgttggatcagggcccacccggttcctcgtggcctcgccttaactgggccatgtctgcagagaccctatttccacataaggtcctattcacaggaaccgggggtcaggatgtcagcctgtctttctgggagatgtagttcaacccacaacacacatcaaacagttattgagcgccgactgcgtgccctgccgtgtgcttgaaggtcccaccctcaggaagcggggcctagggatggcggccgtgatcacgcaggcagcagagagcagctctgggaagcggggagggacgaggacggggaggcgacatcagcaaggccgtgtgtgagccaggcagggtgtccccggtgtagcacctggctcgggcagaggccccgaggaggggctggaggagctgggcgaggaggcgggcaggacgggcctgacactagggacctcgggccccgggaatgcctctgggggggcgtgtacacccgttgctcccaggaggcacacactgcggttcgcttcgccaagaatgtttaattgcatttgatgactacggtttccattcattcatttgtagagatataacactcagaccacaaaatgcataaaatgcggtggcttttagtattaacagagtgctgcacccgataccacagcctcactccagaacattctcatgggcccaaaaggagacctggggtgttagtcaccagctcactccccgtccccagcccctggcaacccacgctacttagtcattatttaggtgtttaggagttgcaaagtcaaatctttaaacccacatatggccaggcgtggtggctcacgcctgtaatcccagcactttcagaggccgagacgggcagatcacctgaggtcaggagttcgagaccagcctggccaacatggtgaagccccgtctccactaaaaatacaaaattagccgggcgtggtggtgggcgcctgtaatcccagctactctggaggctgagacaggagaatcgcttgaacccaggaggcggcggttgcagtgagccgagattgtgccactgcactccagcctggacaacagagcgagactccgtctcaaaaaaaaaaaaagtaccaaaaagtgccccaggtcataagggcacagctcgatagctggtccctaaagggaacgtggtgtaaccaccacacagaacgaagctggaacgttcctgccgtccttagaagctgcctttgctaaggggaattgccctgacttcccacaccattgattcatctccagacccttggttttcatgttgatttttcaaaaatcacctgatagtctgaccgaatgtagctttccactggtgtgtgtgtgtgtgtgtgtgtgtgtgtgtgtgtgagagagagatggagtctcgctctgtcacccgggctccagtgcagttgtgtgatcttggttcactgtaacctcctcctcccgggttcaagagactcgtgcctcagcctcccgagtagctgggattacaggcacccgccaccacacccagctaattttttgtatttttagtagagatggggtttcaccatgttggccaggctggtctcgaactcctgacatcaggcgatccacccaccttggcctcccagagtgctgggattacaggtgtgagccaccacgcccggccttatttttcccccattttctttttttttttttttgagtcagggtcttgttctgcgctcaggctggagggcagtggtgtggggatcacggctcactgcagcctcgacttcctgcaccaccacgcctggctgttttttttttttccggtagagacgggggtcttaccgtgttgcccaggctggtctagaactcctgggctcaagcgatcctcccgcctcggcctccgcaaatgctgagatcacacgcgtgagcccccgcacccggcctcctttccaccgctcttgtctacagccgcccctcctggtccgattgtattggcagatgtcgccaatacggtgtcaaacggcgaaggggcactgagcgttttttctttctcccgtccttggcggcagcagctcggttccggctacggggctgagcccgtctctcagacgaggaaactggggtccgagaggtgagccggtcccagaggcagggcgagggggaagcgggagtggggtccgcagcggacccagccctgcctcccccctgcaggagatcgtcaacttcaactgccggaagctggtggcctccatgccgctgttcgccaacgccgaccccaacttcgtcacggccatgctgaccaagctcaagttcgaggtcttccagccgggtgactacatcatccgcgaaggcaccatcgggaagaagatgtacttcatccagcacggcgtggtcagcgtgctcactaagggcaacaaggagatgaagctgtccgatggctcctacttcgggggtgagcttgaggggggcgcgcctggagggggagggggcacgcgacccccgcggtgtgcagagccagggggccggggccggggccggggccggggatggggatggggatggggatggggccggggatggggatggggatggggatggggccggggatggggatggggatggggccggggatggggatggggccggggatggggccggggatggggccggggatggggccggggccggcaccagggagagcctgggtgggaagcgcccacgctggccaaggtgcagaggccgggccgtgtgcctgggcggggagggccgcggcgcccgcctcgtccagcaacccccccctgcgcgccacgtgcagagatctgcctgctcacccggggccgccgcacggcgagcgtgcgggctgacacctactgccgcctctattcgctgagcgtggacaacttcaacgaggtgctggaggagtaccccatgatgcggcgcgccttcgagacggtggccatcgaccgcctggaccgcatcggtgagcgggccgggggcgtggccggggcgggtgccctggcgggggaggggcgtggccaaggcatcaggagagtggcttggacagtggcagggggaagggcgtggctgtggcatcaggggcacggttggggcagagacgtggccaaggcatcaggagtgtggccatggcagcaggggcgtggctggggcaggggcagcggctggccgctcctaggacccctttgggtctagaggctgattttctgacctattgtcctacttcagccagaggcagcctgtttcccaagggagggaatgcacagggtgtttgcggttgtgccgaatgctcggtgagcacctgctgtgtgctgggggtgcaggggacagacccgggggcccactcagactcccagggaggcttatggactggtgatgaaatcacacacgactgggctgtgtgccagcagggcaggtggggccggtgggcttccctgagttgggaatgcagagtggagaccagggtaagggatgccatgtggaaacggggaggaagatgtgttcgtggagtggacacagcacatcccaaggccctgaggtggaaaagaggcctagagtccagagagccagggaggcctggaggaggttggggaagaaggggaggccagacacacagggcccagtgggcggcagggagagtttagactaaatcaggagcatcagggagccatggagggttctaggtgggcggaggacctggtcagattgtatccgccaaggcgggccgtgtccaggagggagacggtgacctggcctctcaggggggcagtctctggggcagggaggggcagagccctgatgactggatgtaggcgccagagagatggcggctcatgctgctgttcgtgggaatgggaatgaagaccatggctgaaacgcaggacaggtgcgacggagtggtgtcagggagctccctggtgtacagtaggaagctctccacaacttgctctatacagtgagtatgcaacccgttcctgagtatcaggtgcttaggttataacttctgtatacagcaggtgctcagcacaggctgtgtacaggcaggtgttttcggtatgcctgtggcacactggaggcagtcattacataatcagcgtatacaggtggtacacatgcatacttggtgcacagtgatacctgctccatgtacacagcaggcattaaatacctgtttactgccaggcgcggtggctcacgcctgtagtcccagcactttcggaggccaaggtgggtggatcacgaggtcaggagattgagaccatcctggctaacatggtgaaaccccgtctctactaaaaaaaaaatacaaaaaattagccgggtgtggtggcgggcgcctgtagtcccagctactcgggaggatgaggcaggagaatggtgtgaacccgggaggtggaccttgcagtgggccgagatcgcgccactgcactccagcccgggcgacagagcaagactccgtctcagaaacaaagcaaaacaaaagccctgctttctgtatgcaggtgcttcatgcatgctggctgtgcatagcaggtgctcagcctgtatatggcaggtactcaatatccatactataggccagagatgctacatatgtgcttattgtatacagtaggtggtaaatgcatgcttgctctacacggcaagcactgtgtgcgcacccgcggtgcagagtaggtgctcggtgcccgctgtacgcagcaggcgctccctgtgcacacgctaacgccccctctcccgcaggcaagaagaattccatcctcctgcacaaggtgcagcatgacctcaactcgggcgtattcaacaaccaggagaacgccatcatccaggagatcgtcaagtacgaccgcgagatggtgcagcaggccgagctgggtcagcgcgtgggcctcttcccgccgccgccgccgccgccgcaggtcacctcggccatcgccacgctgcagcaggcggcggccatgagcttctgcccgcaggtggcgcggccgctcgtggggccgctggcgctcggctcgccgcgcctcgtgcgccgcccgcccccggggcccgcacctgccgccgcctcacccgggcccccgccccccgccagccccccgggcgcgcccgccagcccccgggcaccgcggacctcgccctacggcggcctgcccgccgccccccttgctgggcccgccctgcccgcgcgccgcctgagccgcgcgtcgcgcccactgtccgcctcgcagccctcgctgcctcacggcgcccccggccccgcggcctccacacgcccggccagcagctccacaccgcgcttggggcccacgcccgctgcccgggccgccgcgcccagcccggaccgcagggactcggcctcacccggcgccgccggcggcctggacccccaggactccgcgcgctcgcgcctctcgtccaacttgtgaccctcgccgaccgccccgcgggcccaggcgggccgggggcggggccgtcatccagaccaaagccatgccattgcgctgccccggccgccagtccgcccagaagccatagacgagacgtaggtagccgtagttggacggacgggcagggccggcggggcagccccctccgcgcccccggccgtcccccctcatcgccccgcgcccacccccatcgcccctgcccccggcggcggcctcgcgtgcgagggggctcccttcacctcggtgcctcagttcccccagctgtaagacagggacggggcggcccagtggctgagaggagccggctgtggagccccgcccgccccccaccctctaggtggcccccgtccgaggaggatcgttttctaagtgcaatacttggcccgccggcttcccgctgcccccatcgcgctcacgcaataaccggcccggcccccgtccgcgcgcgtcccccggtgacctcggggagcagcaccccgcctccctccagcactggcaccgagaggcaggcctggctgcgcagggcgcgggggggaggctggggtcccgccgccgtgatgaatgtactgacgagccgaggcagcagtgcccccaccgtggccccccacgccccattaacccccacacccccattccgcgcaataaacgacagcattggcgccaagcctggccgcgtgtgattgcccgagacccgcagggcgtgcacccttcctgaagacagtggctcctgggggtggcaaaagagctttatttacacactgacaaggctcacggggtgtcagctgaagaagtaggtggaacgcttcacctgctccaggtcgaaggcccctgcggaggaagcagagcggacggcgtgggtggcgggaaagccccgccctggcccgcagttcgagccacccttgcgaggctgcccacccgcctacctggcttgggcaccgcctgcagtgtctccttcagctggctggcctccaagatcttctggggcctggggttggaagcagggtggggtgaggctgaggccaggttttggggtggggggggaatccaggtagttggggtcagggagcgccttactcagagcagaaccgcttgaccaggaatctggacaggtcctgcaggatgggctcgctgtgcaagcggacaaactgctcccggcacacctgggcaggagtcagaggatccccaggggtgatcaggcaggctctgggcaccacccctacccaacgccccagtgtgggggccccacccatgggtggactgaggctcagactacgggggcacctggttcatgacggagacatcagctgcgtgagtccagtaacagtcgtgcacagagacgaaggtcaggcccttcctgtggcagagcggaggactcctgaagggaggggagctcacagggccacccagtgaccagcatcctggccctgcgctcagccccctccacttgaggtccagggaagcccaccctcctgcaggcctcgccccacccctcgccccgcccctccccaaacatcctgggttaggtatcagtacagggggaggaaatgttcccagaagcctcctcgccccacccctgccgccccccacgctgctgtgggagcctcagctccgagggcggctacgaggtcccctcctgccagggccaccaccccgcatcctgagcattcccagctcccgtggccggtagattctgctggaacgacctccacgtgctccagatctaaccacacatcgcggtgccaagaaatgcccagcaggaaggggcagcgcccatgctcggctctccctgtcgggccacaggaggggagctgccaggaccacctacattcggggcacacagcctcagggcctctacacaggccccacagacacagcagatccactctgcccagtccctgcccccagctagacccagccttgccagctgtgccctgctagccagaagacgcccctgggaggcgagcggcacccacgccgtccggagacgcccacctgtagcagtgcagggcggtgagcatcatgtgggaggagtccagcgagtggatgaagttgggcgggaagccgttcttctgcttacgtgtgttgggctttctgaggacggaacaggtgccggtgggggcggcccagggacacccctaactggccgctgtctccaccgtggctgctctccagacccccggccaggccccagcccgggccccccactcaccggctgatgtctccgttgtgggtgtaggtgatgctctgaattccacctcctatttgctaaaaaggggaaggggccggtgagtcccacccgaggcccagcacggtggtggtacattgaggtggtggtacactggggtagtggcacgctaggatggtggcacactggcgcgggatggggtggcacactggggcggtggtacactggggtggtggtacgctggggcactggtacactgggacgctgttacactgggatggtggcacactggggagggatggggtggtacactgaccttgaccttggagtccaggcgatagggctggatgacggggacgcccaggggtgtgacccactccaccacagagcccatgtgggagatgaggcgggcactctcggtcagccagtgctgtgggacacaggccgtctcagggcagggggctcaggccggggatcccgtccacttgcttagggagtcctggccgagcggggacaggacaggacgtacctggatggcccgggtccccgagaacatctcctgtagactcttgaagacctggcgtacgagatagtgagaggcctcccacacgaactcctgcagagggcgggcagcaggtgcaggtcctcaggggctggcccgttcacgccctactcccccctatttcagagccactgaggcccaaggcctagggcctagcaggggggcaggggaatggggcctggcgcccacgcagtcagcaagaaacgcccaagccctaacaggcagccagtggtctgggggagcagccagggctcctgctgggaggctgggtcgggggcacacccgtctgagttttaaatggcagtgaaaccaacgtgttcgcagcgcgacatgcctggcgcacctggggaaagtcgctcagctcccggaggcgcttctcaatctgcaggcgcccgccatagcgcgtgaccccgtacaccaccgtcatcaccgtctgcttcaccaccttgcgggtgatgaaaccttccagcacctgtgccacccgcatgccccgctgggcgtcctgcctacggaacacctccacctgcacggcgggtgggccgggggcgcgggtcagccccgctagcagcccaggggccaccaagcacccatgaagcccccgccccagccccaccacatcctcaggacaggccaaggtgagggcacctggggccgagactcagggctcacattgcccccacgccgagatgcccccgggcagcagggcacaccctacctgcgcggccacgccgctgtacacgtcctgcggcacatccgagggctccaggttgacggaggcggcgcccacgctgtcgcggcccagagcagcataatgctgcaggccgttgcaagagccgtcctgaggaaggggcggcaaacgggagatggaagctagagaggcagagacgtgtgggaccccaaaccaccccccaggtcgagccgttcctagggccgtgcaccccccagccaagtgcaccggagcccccgcacgctcccgggagagaccaggagccatggctcccgcacactctaggaccacctccagagaataccacgagcgaaggtgaaatctcacaccctcaagtcgagccccaggcccagtgcacactgcacggcctcgggggccagacccagctggctcacctgatggacggggaggtgggagacataggcggcagggtcggaggcgcgcacagcgttcgccacctccatacagcaggccagcgtctgccagggttcctccgcgcccatccaccactttcggccctgcggggacagcggatggggggcagtgaggcccgggcccgatccctgagcccgctgggaggctgtgttgcggggaggtgggaaatggggaggagacgcacacccgtgatagtgaacacgggacgcatgtgggcgagagacggggcggtggctggatgagttctccatagccacggatggaggatgggagctgcgggtggaccgggctgaaacaagcgtgtccggagctgccgggggaggagggtggacagaggacctgggggcgccgggggaggaagcagctcggcggatgcaggggaggggggaacgtggggaacgcgggggccctggggcaggggagaagggagaagcaggacgggcagggggcgcgggggaggagagcgggcgggggacgtgggggcgccaggggagggggaggggaggaggaagacgggcagggggcgccaggggagggggaggggaggaggaagacgggcagggggcgcgggggcgccgggggagggcgcgggggcgccgggggagggcgcgggggtgccgggagggcggggaatgcgggggccccgcccctaccgtcaagggttggtccgcggagtccaggatgtcatccatcacctcctccgcaaaggccaggcgcttccgcagcggctcccgcttcttcaaccccgtgagattgaccaggtggatcttgagccaatccaggccgtgcgggccgagcgggcggccctgggcgaactccagcagggcccgcgccacgtcgctgcccaggtggttgaagtgcggcgggcaggggtaggtgcggccgcggaagtccatgttgtgcggcagccagaagacgcggtcccgcaggtgctgcgccagcgagaggcggtacagcgcctccgcccgcaggctgtgcatctcccgggccaccttctggcagtgcgccagctcacggcgcagctcggccttgcgggcgggcgcggcgctgtgcggcaggtgggcctcgggcggctggggcgcctcggagggcggggccggcacgcctagctgggggcagcccttggcctggaagagctgcagcaccaggtccagcacgcgcccgttgacgcgccaggcgcagttgcccagttgggtgagggcgtccagtgcgccatgcagcgcggtgggcgggcaggtttccagcagctcctggtgctgcgtggcgccttccaccgtgcgcatcagcttggtggggctgagcaggaaagcaccagagtgcggcgatgtccagggcagcggggggcaaagcatgggtacatccaccgcctcgaaggtcagcgtgggctccgcggccttctccagcagctgcacgtaggccgggtgcggcttcaggatgccgatctggggtgcgacaggcagacgggtcagggccccggtgctggggctttcctgttcccaccccttaaacttgggtgagaggggccggctccccggccaacaagaaaccagtgtggcctcccacgaacagaagccacctccagaaacggccggacacctgcatggacacccatggtgtgtcccgagtcctgggaggtactgacggctgcgctgagatcaaggctccgcccaaaggcgccaaccccatggggtccctggtcctcccagcgggatgccccccagctcaggagggcactgcctggcacctgctggacgttgcggaaggaatacacgtggtagagcacggggacaagccgagaggaacgatgcggcttgtccaggctgcatggcatctgcgtagcctgcaccagcatctccgccagcagcttgcccagctccatctgcactggcaggggccagggctgctcccgcagggcctcgggcgcccccagctcctcccagtactgccgcggcaggcagggctcgggcacctgtaggacagggcggtcagggcgctgggcaccggggcccctgagctagatgccccaccgcccgtgcctgacgcccggtggggcatctgtcagcccaagcatacagatgaacagactgaagcttgggtgcaaacccggctgctccagggagggagagcgcccacccaccactggccccagccaggaggagagggggtgcgagcctcacctcggcgtcggaggccagcaagcagaggtacttcctgtagtggttctgcagcgcctgcacctggccactgacccgctgcctctgcaccacgtgccggctgaaagtgcgcgcactcagctcccgggccagggtggtgaaggactcaccttgggcgggcagcgcctgcaggacctgcggaaggcagccgtgagtgcctgcccgccccgcccggggacccggccgcgcggaggaagacgcacctgcaggagcatccgcaccacctcgcgctcgtccagcaggcacaggaaggggtaaagtgagaaccggccctcgtacacctcgcgctctaggcggttcttggtctcccgcagcgcccggcacagtgctttctcccattggtcccgcagggtcttcagggtcttccgctgcgggggatgaacgggcccggtgagccccgtggcagctggtgggacccaggctcacaggacgggggtcaccgcagctccctgcagagacctcatggccctcaaggtccctgctgtgtgttccgggtagctcctcaccccggcctgccctctgccggcttcagcgtgcctgacgcagccaagagcaaaagcccagctgcagtgtgcgcagaagcacaggccaagacccaacctcgggaccccacaagttttccctgagcggcagccaggctgagttcctaggccctgcatgaccagaccagggcatgagcaattcaaccgcatacacggagctcagcccctgcggcggacacgcgaccccggctcagcccctgcggcggacacgggaccccggctcagcccgtgcggtggacacgcgaccccggctcagcccctgcggcggacacgggaccccggctcagcccctaccgcgtgcttgacctccttgcttggcaacgtgggcttctccacggacaccacgcacaccctgctggccagctccatgtggagctgcttctcaaagaggcactgcagggtcttcaagggcaggtgcagcttcgggtaggacacacgcccatcctgcagggatgggggtagtgaggttgggggcttgccagagggcgacctgccctcccaggaccccgagacagcatgggtgcacgcgtttctgcgtctcctgcaagttgctggtggctatcgctgacgcggggaaaggcgggctgcgggtaaagtcagtgccagcagtgcaaaccaaaggccttgaccctcctggcctcgacccctctagaagggacactgggcaccgtgcagggggtggcaggggcggtgatgctgggagctggcagagcctggggagaccgttcactgcacccccagatgttggctgttttctcctcaaactcagaactgtatgaatgtgacccatccagaaatagatgaattaaaaataacaactaaagcctagcgctttgagaatcaaagacgcacgtccacataaaagcttgtacacaaacgttcacagctgcatgactcgcagtcgataagtagaaacagcccaacgtcccataaacggacgaacagacgggcacggcgcggccatccacgcaccggagcatgactcagccctgacccaggtcgcctcccggaggcaccatgaggacgtcacgctcagtgggagatgccaaacacaaaaggtctcgcagtgtgtggtcccatttctatggaatgtccagagcagactcatccacagatggggaggggatggggagtgacggggatggggacgaggcttccttttagggtgatggaacattctagaattagacaaccgtgactacactaaaatcgctgaattacacctttaagagggttttatggcaggtgaattacacctcagtaacagacgagcccactgcgtgcacctggcagccccactcaaacgcactgctctcctgtcaccccaccctctctctgcggcccccgaccacctcgtccccctgagcccacaccctcagggccaagaccctcccagctctgggtcctcccatcttctcagaggaggaagggaggaattcagggcccagcccaggtgagccctgggcaccggggaggcccattggtctgagctgaggctccaggaacccccaaagggcagctataaggactgaagtctgccggggcccacgtgggctcaccttggcatacacgtccctgagcagcttggaggtgttgaccgggggcggcagctgcggcgggaggctgaaggtgggcttcaccttgtgcacggccttcagaacagtggcccgatcctcctcagacagcagaacggcggtgaagagtgcctgcagcttcagcccctcctggctcatctgttccagacacctgtggtgcaggcggcctgctcgagggacgggccagccccacgctgggcttccacagaccccaggggaacctcgtgaccacctcctgctagcctgcaggtctcggtgtggctgtcaggccctctgggggtccccagcccccagcccaggcaccgtcccagatcttaaaaccctgggagggacatggtggggggtgggggccctcccgacaccacctacctttcgatggtcccggcgtcctggtcctgcctccccatgcactggagggcagccgcataggacagcaggtccggagtcaagccggcatccttcaccatgaataacacatataccagctccttgaaggcaccctgggagaccaagccagggtgagggtctggggggatggcccaacctccacatcctccctgctccctggagaccccttctctgtagccaccagctcagcaggggacagggtcaccaggcaggagtggccagctgggcagaccgatgcatccccctgaggttctgacacacaagctccacctgcagaggcagccgcatggcccgccaggtgggactgtgggaggttcacgttcctctgggaggcagcttgttaaacctccagatttgtcaattgtgtggatcttttcaaaggactgacttggcttgactgttctctgctgtttctgccttccatttcatcgatttgttttaatctttgtaacttcctctcatctacttgctttaggtttagtgacagcttcttcttctagtttcctaaggtgaaaggtgacgtatttggtctgagatgtttcactttttttccccccaagatggagtcttgctctgttgcccaggctggagtgcagtggcacaatctcagctgggccgggttctctgcctcccaggttccagcacttctcctgcctcagcctcctgagtagctgggattacaggcacacgccaccacaccagctaattttttgtattcttagcagatacggggtttcaccatgctggccaggctggtctcgaactcctgacatcgtgatccgccagcctcagcctcccaaagtgctgggatgacaggtgtgcaccaccgcgcccggccatcacctttccgaatataggcattttgtgactataaattaccctgcgagcactgtgtcagctgcatcccaggacttctgacaggtggtgttttcattttcattatctccaagtgttttcgaac[140 bp omitted]gcctcagcctcctgagtagctgggactacaggcacatgccaccacacccagctaattattttgtatttttagtagaga[141 bp omitted]ttttttttttcatttaatttttggccaggcacagtggctcatgcctgtaaccccagcactttgggaggccaagacaggaggatcacaaggtcaggagtttaagaccagcctggccaacatagtgaaaccccatctccactaaaaatacaaaaaaaaaaaaaaaaaattagctgggcgtggtggctcatgcctgtgctccctccactaaaaatacaaaaaaaaaaaaaaattagctgggcgtggtggcacatgcctgtaatctcagctactgggagcctggggcaggagaatcacttgaacgcagaaagcggaaattgcggtaagccgggatctcaccactgcactccagcctgggagacagaaactttgctgtcgacagacttggagactctgtcttaaaatatacacacacacacatatatatatatatataaaataacatatatatataatttttttcttgtattcatttttcctgacatccctgttctgagcaatttctcctttgacccagtggctgcttaagagtggcctgtaactgtaacagactattccaaagggaaaaaaattcccttacatcctcccaccccatagtcctgcagctgaagacatgctgtgacatgaggtggccacacaccagaga[137 bp omitted]tgcctcagcctcccaagtagctgggactgcaggcgcccgccaccacacccggctaattttttgtatatttttagtagagacggggtttcact[136 bp omitted]cctcactggccacacatagtccttaaattgaaatattcagttcttccctttcaccagcttcaagtgttcagtagcacacacagctgttggcagatgcggaaaattcccaacatcatagaaagttctactggatggtgctggttagaatacgtggccgggcgcggtcgctcacgcctgtaatcccagcacttagggaggctgaggcgggcggattacctgaggtcaggagtttgagaccagcccggccaacatggcaaaagcccgtctctactaaaaatacaaaaattggccgggcgtggtggtgagtccctgtaatcccagccactcaggaggctgcggcagggagaattattgaacccaggaggcggaggctgtagtgagccgagatcatggcactgcaccctagcctgggcaacagacagagagtctatctcaaaaaaaaaaaaaaaaaaaagatagaagcaatgccttagcctggctaacatgctgaaaccccacctctactaaaaataaaaattaaaacaattatccgggggtggtggcacacgcctgtaatcccagctgctcgggaggctgagctcgcagtccagcgacatccaggactgctggccaccccggaacgctgggagaggcaggaggggcccctgctagagcctctggagagacttcgggtctgcagacatcttgattccagacttctgggctcgtgctaagagtgcgtttctgctgtgcaagccgccaggtttgggacactttcgtaggggccgatcccaaaagcgccctgttacagtgtgggctctctgcccagggaatccagggggcttgtgaccttggaggggaaaatacacgaccctcatcctcagtcctcccggagtctggcgccccctgcagcaaggaggaaccaggcagcacgccgcctccacctcgcggtaagagcactgcggacttcaccgcaagactggccccacctgatcctgaatttcgctgtttgatgcgttaataaagaagcacatcaagttctctaccacgaattggtcttaatattgcgatatctgtattttaatataatagtatcccatgtttacccaaatattaagagaagcttttactgttgtttctcaaattagggctgaaggatcatggggggggagaaagctgggaacgtttgctgctttgaaagggtgtgtaaacaacaccctccaaaacaaccaagagttccgaggagaaactttggccggatacggtggctcacgcctgtaatctcagctcctcgggaggctcaggggggcagatcacgaggtcaggagtttgagaccagcttggccaacacggtgaaacccccgtctctactcaaaatacaaaaattaatcgggggtggtggcgggcacctgtaactccagctacttaggaggctgaggcaggataatcacttgaacctgggaggtggaggtggccatgagccgagatcgcaccaccgcactccaacctagtaacagggagagtatgtcccagaaaacaaataaataaacaaacaaaaagaaaacggcaagggaaattggaaaatactccagatgaaccacaacgaagatgggtgggatacatctaaagctgtgctcagagggaatgcggcgccagtgaacacccacatttcacacagaaggatctcagcacagcagcccgaccttccacctcaggaaaccagaaaaaggagcaaagtcaaccccaacaccaaagcctcatcctgacgagggctctgcaggctgccccccgacgaggccaaaagcacccctgcccagacagattcacgagccccgagaaagaacggaaggaaatgctcaaggcattagcagaatttctccctacttttttggtcattttcaaaatttgagagtcacacgtgatttgtatttgaaaagcctaaaagaattattaaaataaaaaacaaaggacttgaacctgggggctaagagagaaaagtccagtctaaatgagggcaagttcctgtctccaacgaccagggcaggtggcccggctcccggctgcactcacctgccgcgcccagccaagcatcacggcgttgtacatgtccagcgtgagcagcttccgcttctgccgctggccgtggtggacgaccagcaggtggtgggcgaggggcagctggtcagtgagcaggcagcacttgaagaaggccaggagcctctgctgctgacctgagagctgggcctgcgagtgctgccccgacggggcctgctccacatcgaggctcagcttcccaggggcctcctgcagcagccgggccagctgctcctcccaggggctctcgggggcctggcgcgtgcagtcctccaggcacccggccatctgcttgctcaggagccggggctccacctgcaggcgcctggtcagcgccttgaactccccgctctggaatggcatctgcagcttcgccttcaaccgctgcatacgcatctgctgggtccgcttatccttctccagtatctttgcccagcggccacagggcaccggggtggcatccttggcccccatctggaccttcctgggtggctggaggctaccatctccactgccacattctgggagccgcgccacatccaccctgttcaccaccacctccgacacgctctcagcctgcagctgccgcacccgcgcctggagcactgtgaggggcagaaggcgaggacatgagagggaccccctccccattcgagcacccgtctctctggaccctgagccaggccaggaggtgcaggtggctgagctcgctgggacccaaggcgtgaattcctcatacttgccaacaacgttgtaaggtctgcccgctgctttccagacacacgcaccccaccacctccgcacctccccacccgagcctcacagaactcagcagccctaacaagctgccaccgaaacctgcagcaccacgtctccccggtcactggccgctcagaccctccaggtgcacaggcccagaacccggggtctgtgacaactccctccgtccacctctcagtacctcctctgggcttgcctccagaatctatccaggtggcccccgcctcccctgcccctctcactgtctagctcagggcctctgcacagactcccaggaccctgaaccgcccactccctggctcaaccatggcctgcaagttcgcaccccgcctcagcaagacccccccagctggtggagctgccacacacacactcctaggctcccagtgtctacaccggtggacgctgagccactagctcgcagggaaaacgcggctcctgctcgtgccgcctcaggttgcatttttgccaaccaatcaatgcctaagtgttctgtatctctttaaagaagccttgttggaaatctattgctggccgggcatggcggctcacgtcggtcatcccagcactttgggaggccgaggcaggaagatcacctaaggtcaggagttcgagaccagcctggccaacatggtgaaaccccgtctctattagaaatccaaaaaattagctgggcgtggtggcatgtgtctatagtaccagctacttgggaggctgaggcaggagaattgcttgagcctgggaggcagaggttgcagtgactcaagatagcgccattgaactccagcctgggcaacagaacaataatccatctaaaaaaaaaagactgttgaaataagccgggtacagggccgcgcacctgtggtcccagctactccggtggctgaggtgaaagaatcacctaagcctaggagttcctggctgctgtgagccgtgatcaggccaccgtgctgcagcctgagagacagagcaggaccctgtctcaaaaaaaaaaagggggggggggacccaggtgtccagatgtggtggctcacgcctgtaatcccagcactttaggaggccgaggcaggcggatcacgaggtcaggagatcaagaccatcctggctaacacggtgaaaccccgtccctactaaaaatacgaaaaattaaccgggcgtggtggtgcgcgcctgtagttccagctactcgggaggttgaggcaggagaattgcttgaactcgggaggcggaggctgcagtgagccaagatcgcaccattgcactccagcctagcaacagattgagaatccgtctcaagaaaaaaaaaattgctgaaataaaaagacaagcgtgatgtccgccttcagagtgctccaaaactcaggagatacttttaggattaacagttgagagctttgttttgttttgttttgtttttgagatggaatttccctcgttgcccaggctagagtgcaatggcatgatctcggctcaccgcaacctccaccttccgggttcaagcgattctcctgtctcagtctccccgggttcaagcgattttcctgcctcagcctcctgagtagctggcactgcaggcgttcaccaccatgcccagctaatttttgtatttttagtagagacagt[151 bp omitted]tgctgggagtacaggcgtgagccaccg[140 bp omitted]taatggacgcagacaggatgtgggacagaagcaccggcgggaagcaagcacagggaagctcccacctccctcccacaccaccagccaggccaggacgagggcctgccaccgctggagcctgggctgtccctcccaagtttcgcagtcatccagtctccattaggcgcctaccccccagagccaagccaggacagctgagtcagttcagggttcacatcctggctctgcacatgtggccttggcggcggggccggggggggggtctctccagacataatcttgggcctcacctatgtccctggaaagtgggagcacctggtggggttctggggagggggaattacgagagctccaggaaggagcctgctcagcaaggacagggcccatgagcggtgcaagagatgtttcagcaacgccgtctgggcgtgtcctgggacccgagaggtggagaccgccctcagcctgtctcagaatctgagcctttgccttttctcccggcagcagggagcggactctcctctcccgggccgccgtgggggtcgcgctcaccctccagcagctccacgtggccccagtccttcctgcggtcttggtcttgctcctgggggctggcggacgagctcctcctggggccgcagacgccaccggcggtccctgcgggaaagacgagagcggctgagcggggccgggcgtgtgggcgggggcctccataaaggcagaagccgaagggtcgaagggcaaaggagccctaaacgcagcggaaactctcggagcacgggcttaagttggaaagaaactaagacagcgaaggtggaagggccccgccgcggcgaacacgggcgcggaaccgccgagagagggttcctcgcactcgaggtgcagcaggtcaaaggttaagagccctaaacaccacacctggggtcaggaggctgcataagaaaccacgagtcaaaggtcagactgcacggaggagcctcagtcgaaaagcgggcaagggcgagtggaaagcggggccgggtcggtgggctgcgcacgcccaggtgcaaagaggcaaaggtcaaagcgccaaaggccccggccgcgcggggaggagcccacgccgtggcccccgggctgcctggccgtctccctttgtgttaccttctttgccggggagtcccgggcggccgcaaggccgtagggctcgtttgagccccgccgctccgcggccccagcaaagtgccgacattacgcacgccgctccaggccaccccaccggcccgcgcctgcgcatgcgcccgcgccgcctgccgggagttgtggtttcatggtcgacggaggctgcgaagggaaaccccagccggaagtagactcccaggatgcagcggaggcgcgaaggcatgcgccggtggacgctctgattggttcctcctgctgtttttaaagggagggggcgggacagagctgttgccgtggcaactgggaggcactctcaggctgttttcccgaggacctcaaatccggactttttttctgtttttctttcttttttggttttgttttggacgcgttgtggcccaggctggagtgcagtggcgtgatcatagctcagtgcagcttcgaactgctggggtaaagagatcctcgcccctcggcttcccaaagcgctgggattgcagacgccgccaccgtgcccggctttttttttttttttttcaaggcatactcatctaataacgaggacagcatctgcaatttagagattcctgtccgcaaccttcattgctccaacgacaacttttgggtaagagtcattaggatgccgtctatcatggaggaagctgaggctcagagagggccaccaagttgctggaagacacagcacgtgcgacctcagggaggctgcaaggagagaaagccccagtccgcgagactcccagcctccagcttcagtttaccctccaatccccaagccctcaggggcaggagccgaatggagcggcaggcttggattcacctgctaagtggggtgaggtcaagggaatgaaataaacctcggagcctagagcctgccctggtctccgcgtgatcctgcctaggaggagcagggcgggagctttagaatggaacctggaaggtgtgcccacctgtgtcgttcagccggggcagcaggccagaggcgggagcgcctgctgtggggcagtaggcttgggaagggtgagaataggaatatctgggggtaactgtgttccaggctaatatcccagttgcaaaggggagctggtttggtggctcaggcctgtcatcccagcactttgggaggctgaggcgggcggatcacctaaggtcagagttcgagaccagcttggcaaatacgcaagcatgcctggcaacatggcaaaaccccgtctctagtaaaaatacaaaaattatccgggggtggtggcgggcacctgtaatcccagctactcgggaggctgaggcaggagaatcgcttgaacccgggaggcggaggttgcagtgagccaagatctcgccactgcactccagcctgggtgacagagcgagaacctgtctcaaaaaaaaaaaagtgcaaagggaggtcagttcagtgcctcaggcctgtaatcccagcactttgggaggctgcggcgggaggatcgcttgagcccaggagttccagacaagccttgggcaaccgagatactgagacccagtctccaccaaaggaaaaaaagaaattagccaggcatggtggtgcacacctgtggtcccagatactcgggaggctgaggcaggaggactgcttgagcccaggaggtttagactgcagtgagctgagatggcgccactgtactccagcctgggttgacagaacaggaccctgtctcaaaacaaaacaagtgcaaaggccctgaggcaggaacaagcgtggacagaggagcaatttgagcagagtggggctggggagagggagcaaagatgtagctggggctcagttagggggcctgaccacacgggggctcgggggcctcagctcaagctatcctccatccccaaaccctggcacttcagtttccccatcagcccagaacgaggactcgacctcactctggaagggcctggcagcctccttacagcacattccagacgctgctgccgacgcctgcgtgagcgcactgatgccaccggctgggaatgttttcgacagacggcagcaccctccctcacctgcctcagtccacctcagggtgccccagcgggctgtgacctcagacctcacccactactggggtcacctgcctggccctgaatcagccaggcctggtgtgccaagacctacagacaccccctgcacccctgcaggctggcagagccagaaacttgggtggaaaccgacttctgaactatttcaccattccttatgcgttagtcttttcttttatttgatgagatcccagcactttgggaggccgaggcgggcggatcacgtgaggtcaggagtttgagaccagcctggccaacatggtgaaaccccgtctctactaaaaatacgaaaattagccgggcatggtggcctgtgcctgtaatcccagctactcaggaggccaagggaggaaaatcacttgaacctgagaggtggaggttacagtgagccaagatcgcaccactgcactccagccttgggcaatgtagccaaaccccatcactacaaataatacaaaaaaattttgttggctgtgatggtgcctgcctgtggccccatctacttgggaggctgaggtgggaaga[135 bp omitted]gtttctgaaacagctcattgcccaaattccagcctcgcaactctgtagccgccaccaccccccagccccaccatttattttaactacatctgtctccaccactcctgtattaagtaaatgcaatattggctggtcatggtggctcatgcctgtaattccagcactttgggaggctgaggcaggcagatcccctgaggtcaggagttcgagactggcctggccaacgtggtgaaaccctgtctccactaaaaattcaaaaattagccggacgtggtagtgggtggtgcctgtaatcccagctacttgggaggctgaggtaagagaaatgcttgaatccaagagactgaggttgcagtgagctgagatctcgccgctgcactccagcctgaacgacagagcgagactccgtctcaaaaataaattaataaatacaacattaattatttttcttgcttaagttttacgaagagacttaatatcaccatcaaaagtgggaaaccatatatctggccgggcgtggtggctcccgcctgtcatcccagcactacgggaggccgaggcgggcggatcccctgaggccgggagctggagaccagcctggctaacatggtgaaaccctcatctccaataaaaataacaaaaattagccgggcatggtgggtgcctgtaatcccagctattcaggaggctgaggcagaagaatcacttgaacccgggaggcggaggttgcagggagccgagatcacaccactgccctccggcctgggcgacagagcgagactctgtctaaaaacaaaacaaaacaaaacccaaccaagcaaaccccacagagtcgagaatcgctagatggaaggggatggcccaggtccctggagcccctgtgacaaattaccacaaactcggtgccttaaagcaacgttcattttcttacatttctggaaatgaaaagtccaaaatcaggactgcggggctgaagtcaaggtgtgtggaggcctcgctccctccagaggccctggggctccttcctgcctctcccagcttttgaaggctccaggtgtgcttggcctgcggccacatcactcccgtctcggtctctgtggtcgcactgcagcctcctcgtctgcctgtgtgaaatctcctcctgtctccgtattgtgaccgcgtttaggatgccccaggacaatcttctccatatcgttcagatcttcatggtgtcaatatattgagactctttttccaaataaggcaaatgtcacattctagggatcagggtggggacttacctttgggccaaccacagaggctacaaagaggaagacaccactcaatac[137 bp omitted]agattctcctgcctcagcctcctgagtagctgggattacaggcgtgaaaaggagcaaggctctgccccagccacagcgcggatgcaccttgaggatgtcatgctcagtgaaagacgccagacacagaaggacacacagtgtgtgatcccctttatatgaaatgtccacaacaggcccatccacagaggcaggaaggggatgtgtgggtgccgggggctggcagaggggatgagtgacagctgatggggcttcttcttgcggtgatggaatcttctggaactagacagtcgtggtggttgcacaactctacgaggtactaaaatcactgaactggctgggtgcagtggctcatgcctgtaatcccagcactttgggaggcagaagcaggtagatcacgaggtcaggagtttgagaccagcctggccaacatggtaaaactctgtctctactaaaaatacaaaaattagctgggtgtggtggcaggtgcctgtaatcccagctactcaggaggctgaggcaggagaatcgcttgaaccagggaggcagagtttgcagtgagccgagatcgcaccactgcactccagtctgggtgacagagccagactccgtctcaaagaaataataataaaataaaatcactgaactgtacagtgtaagtgggtgaattgtgtggtatatgagtgatgtttccgaggtgtcattaaagaaactcagacgcctggggtggggccagtctcaccgctgtgggtcccatccccatcatttctcacaaggccctcagatcacccttccgcggtggggggcggacactctaagaagggaagacctgggctcctgctggcgagaaggcggtggacatttcttcagtgtctggtgccgcgccctctgcccagcgtgctccgtggagggtctcattgtcttcctccagacgtctctttactggcccattttacagaggcggaaccgaagcttggggtgttggccacagggctctagtgtgggaagccaggccaggctggacctcagccatggggacccctgtccctgagactgtggcacctgccacaccctctgtgtgacccgcctaagccaggaagagagggtcaggagatgcctgagccaccaagaaggcatcccagcgtccagccagaccggttatccctccagagggctccccggcaggacaggctggtcgccatgtcttcagcctggtgctatttaaaggtgggtgccacctggggctgtggccgcagggccaggactgggctgctgggagctgtgtccccacagcggaggtcgccgcccctctcaggcctcggtttccccagttgtcaatgcctccacttggctgtgagtctgtgagggtcactgtgctcaccttttggggcccagcgcatggggcaggcagaggaagggtgggggccagccgccttgctgggtggttccccgtggggcctggggtatggctctaagggaggagcaagtgtgggtgcgaatggggccgccccattcctgccgcctccgacgtgccccgccagccggccaccgacaggtctacgtggctatcctccctcctgcccacctacctgcccaaacacacgtccccagtcgtcacctgcccacccacccgcgcattcccacacccttgtgggcctggctttcgggaaactacaatttgcggggagagaagtcccacgagggcatgccccggagcctggctggtcccacggctgacgcacgcggcaggacctcccgtgtccatctctgtccccaagcatctccgcctctgcccctctctgtctctgtgtctctctcgtctctcccggtcatcttccttgtgtctcttgactgccgccgtctttctgtctctgtctccctccgggtctctgtctccctccaggtctctgcggcccgcgtctcacactcccgcccccgcaacccgaggtcctagcccgcccggggactcggctgactcacggacacgccccgcgagacaaacaacaaacgcgcggaggccgagcgcggagtcccgcacggccgcgcccctgtgcacctggcccccgcccccgagacgtcccattggccggcgccctagcctggtcccgcccaagtggaccccgcccccgccccgaggcaccccattggccggcgtccccgccccagcgaacccggccccgcccccgaggcgccccattggccccgccgcgcgaaggcagagccgcggacgcccgggagcgacgagcgcgcagcgaaccgggtgccgggtcatgcgccgccgcctgtggctgggcctggcctggctgctgctggcgcgggcgccggacgccgcgggaaccccgagcgcgtcgcggggaccgcgcagctacccgcacctggagggcgacgtgcgctggcggcgcctcttctcctccactcacttcttcctgcgcgtggatcccggcggccgcgtgcagggcacccgctggcgccacggccaggacagtgagtgcggggcggcgggggcctggggtggggaggcggcgggtgacggcaacgcggccgccgtcttcacggtgacctgcgcccgcgggggagtcccggaggctcctctgtgcagcctcggcctcagtttccgtggtctgtgagatgggtgcagcctgcctggtgggagggttgcactgttaaagcgaaggctgcagcggcggacccggctcaggggcagagaagcgtccgtgtggtacaaccctgtgggtggggccacccatctgcaggtgggaaactgaggctccagaggggctggggcaggcccagctgcatggcggaagcggcggggggctgacctccggactcctgacatcacagaatccagtcagggctgcctgagtcggggccccctctgcttcttcccagacaccccatctggcaggtgaggacaaggaggcacacagaagggatgggacctgcccagggtcacactgacaggggtggcggagctgggtccccacagggcccaggacgtcacggagcgggcgtctctgtccccagggtctgccgagcacactgaggtaggccctcagtgtttgtggaatgtcaggagcaagaggagaggctgggcacagcaggggatgtgggtacctggaggccaggggagtcggtgtccccgccgggcggggggcactgggaagggggcccgggcccgctggctgccgcctgaatcaccaccatcagggcaggtaatcaccccctgtccttcccaccgctttcatctgggcgccaaggccctcattaggccgcacgtgacgagggcggacaggggactggctgggccggtccatccatggcgggcatggccaggcggggtggcctcgggccggggcagaggcctggctccgctgcctgacctggaacagtctctgcctctctccaagcctcggtttccccagctggacggtgatgggggtgagggctagctgagggctctcctgcccttcgtgcattcgctggtcactaatcgggcaccttgtgggtgctgtgctccgcatgggggacccagtggtgacagagacgcccaccctcctggggctcccagagcagaggcgcgcagcagttagacacgtgaacaagggcgcag[132 bp omitted]cccgtctctaccaaaaatacaaaaattagccgggtgtggtggcgggcgcctgtagtcccagctactcgggaggctgaggcaggagaatgacgtgaagccgggaggtggagcttgcagtgagctgagatcgcgccactgccctccaccctgggcgacagagcgagactccgtctcaaaaaaaaaaaaaaaaaaagaacagtgaatgacgtgaacaagggtgcaggtgggtgcgcagaacagtgaacggcggtgttgggaggcaccttgccaggggaggggaggtgcagggcgaggaaggggccaggggagatcgtgacacagacgccccagaacaaccacctcaaagacgttcctgtgtgtcctggaaggtcgggctgggaggctgccccgaggagctttcactttgacagggagctggccgggcacgcagggaactgtacacccagctgacaaagcggcagacacccaggccggggtgagcgagtgtgggtgaggagtggcggctggccccagggtccttgctggacaagacacttcagctcagggtggggcagggctcacccagggctacccacagacgatggcgtccaaatctggctctgccactcccaggcctcaactggcccctctgcaacgtgggctgctgagcgggcttggtaggacagctggcatacagtcggcgctcaagcatgtctgtggtgtcccataaaccaccggtgtcccactctaggccactgccagcccggcctccagtccagagtcccagtccggagtcccagtgactgtgcgtgggccgggcagctgagctgtgagggccgggctgggggctccatatggggtggtgtgagctgtgagggccgggctgggggctccatatggggtggtgtgagctgtgagggccgggctgggggctccatatggggtggtgtgagctgtgagggccgggctgggggctccatatggggtggtgtgagctgtgagggccgggctggggggtccctggggtggtgtgagctgtgagggccgggctggggggtctctggggtggtgtgagctgtgagggccgggctgggggctccatatggggtggtgtgagctgtgagggccgggctgggggctccatatggggtggtgtgagctgtgagggccgggctggggggtccctggggtggtgtgagctgtgagggccgggctgggggctccctggggtggtgtgagctctgagggccgggctggggggtctctggggtggtgtgagctgtgagggccgggctgggggctccatatggggtggtgtgagctctgagggccgggctgggggctccctggggtgctgctggtcgctggctcattgacagttatcagtggtctgggtgggccctgccccttctgactcccacatcccaggaaccctttcccaaccttcctcgtggtgttgctgcccccctgacgtccgtccctctgggtgtgtgggagcccccccgccatacacacacacagatgctgctcttgggctgagctgcagggacagcgctgacctggccctcccacggggtcctcatcgatctctgcactcccccagctcgtgggggccgtcctgcttcccgttccctctgcctgctccttgctcctccctcacatgctggggggggctcctggtgtcagtcacggctctgggggatcctgagtgtccgtcgtggtcgggaggggactcgtggtcccgggggtctcctggtatctgtcgtggtcctgagggccctgcacgaagcacagcggacagcagcggtgctgggggtgagccagcaaggccctccccgacccccgcctcccccaggcatcctggagatccgctctgtacacgtgggcgtcgtggtcatcaaagcagtgtcctcaggcttctacgtggccatgaaccgccggggccgcctctacgggtcggtgagtgccgggcagggctgggcggcgcgggcagggtggggagggtgggccggcctcacccccgcccgcagcgactctacaccgtggactgcaggttccgggagcgcatcgaagagaacggccacaacacctacgcctcacagcgctggcgccgccgcggccagcccatgttcctggcgctggacaggaggggggggccccggccaggcggccggacgcggcggtaccacctgtccgcccacttcctgcccgtcctggtctcctgaggccctgagaggccggcggctccccaaggtgcctgggctggtggcgaggggcccggccacgcttgttcttccccctgcgggctctgtaagcgctgagtgcccaccgtgtgcgggcgctgtggacacagcccaggagccctccaggggggtcccagcctgagggggtggtggccaccaagcaggttcaatcctgagttggggacctcgaggacccaacagggcgcctctcgggctgaaggacgcagacgtcgaaaggtcgagggggacgtcccaggcagggcccggcagaggcaggggctcggggtggggagcacgttgggagtgggggcaggagcggaggggaggggagggggccggggagacggtgacagacgccgcagaacaccagcctcgaagccggtcccgtcccgggaatctgcaaatacaacgccttgcgaggacaaaggcacctgcaggtgggacggagatggaggagcatccagggtggggggtccagggccccagtgtcctcacagggtcctcacgacaggaggcgggacagtgagagccagagagagatggggatgggccgcgctgtggccgtgaaggggaggaagggccctaagctgagggacgtgggtgcctccagatgctggggaaggcgggaacggttccgcactggagcccccgggagggaccggcctgctcctgccttgatatgagcccagtgggacccagtttggactctggcctccagaaccgccagaaaataaacgtagtaagccatcaactttgtggtcttttgttacagcagacgtcggaaatatgcacacggtgtctgaaactgttctcatgacaaaataagcctcagatcccccggggaagggcggaggccaacgcctcggtgttcctccgatcccccgggaagggcggaggccgacgcctcggtgttcctcggatcccccgggaagggcagaggccgacgcctcggtgctcctcagatcccccgggaagggcagaggctgagggcaggagccgtgctgggtgcagggcaggcctgggggcttcatgccgctgtcctgcgggacgcagagagggctggccgtcggtgtgggggcgcccccacctgtgcccagcgccctcctgacatcctgactccgctgggacttctgcctacagccctgggagtcaaactccagcctctcagagaaaaggtcagagccaagagccccacagcctggagccaggcagtgacaccctgggcctgtctccccttctgtgtgtggggcgacagcagcatcgccctggtgaagtccccggggacggccagggctccatccccagccgccgccttccacataaatacaggaagactgggccgaggcacttgctgggaggtgctgagcagcctgacacggaaaacccttctgggaagggagggtcgtgcccggcccgagagcttctgctcaccctgcagacagaagcgagccccaccccaggggacaccaggcggcctctggggacatctttggctggcatggagtgggtggaggacagggctgcacccaggatgtccccaggttggcagtgtgaggggagatcggcccacgttggccagtcggagggcgtcgccacttgagttgtcactgggagctgcacaggtcaccacagctgaaataaaacttgctggcaccccacgcaggaacgtaacatg[151 bp omitted]aaaattagccgggcgtggtggcgggcgcctgtaattccagctacttgagagg[144 bp omitted]tttctaaaacagagcgtggaatgggcgtacagctccgcacatcccagggcagtgaaatcccggttcacacagagccctcagcagcttattcgcaagcccaaacctggggacccccgttgtcctcaggcagtgaggtgggggccccccaacagagaggagcggcctgggggcacagaaccagcggctccccaggaaatcgccagcagtgaaaataagacaaccccaaactgttgcaaactgtgcttccgcttacgaagcactcctgagcggcagggcggatggggagagggcggctgcaggcgcgaggggcccggggacgcaggggtgcgggccttaccagggccctgtcctgtcgtgcagcaggctcctggggcagggaagacaccaggggcggccacttcttactgctgtctgacctcgagcaatgcggcctcacagcccccaccagggtgccggtgtcctctgggcccagcgcccccgaggctcatgcctgggtggggcgaaccaatcggtcctgctcctctggccactccacgcgagggaagtcccagcctcacaggcaggcgcacaccccggcagcatctctgacaaaggccctccagttccgagtctccaggtcccgccgctgcaagcctcacctgcccagccctcctctccagctccaactccaactcccaagaaccaccacggacacacagaacccgagccttgtctccctcaacgcctcctgactcaaaactccatcttccaacaggaaaacggctcggccgggggactgtgacccggagcaggcggcccagcctgtcgcgcagactcggggcctaaaacacttgttctctcagtccggagatcaaggacgatccgaggtaacctccctacctcggtgtcctccatgcaacctcgtcttagggcaccgggtacgttacctcgtgaggagccgagtccgcgggtcctggggttgagatgtggacgccctcagggctggcactctgccctggcggccacagtcatggaagtcccaacgcttctctcggctccgcaaccccagagggcggccacgaggagggcccgccacgcacgaccccagagggcggccaccaggagggcccgccacgcgcgaccccagagggcggccaccaggagggcccgccacggcgttgcggcagcagcccagaaggtgccctgcgcacggtccggacaggtgggatccgagttacctggccaagggggctgacgcagacacgtcgcgggacacagtgaagagtgtggtgcagagcggagggcgggagtctttggagaacaggtaggggcgtggggcacgcgcctcccacgcgcaggagccgtctaccgtggagggacacgggtggtcctgctggaggctcctctccgttagctgtctccatcgtctgattcttggatcccaggatggtgggatcatcagcaactgagatgaacccactgccccggccccctgagcccgcaggtccccacgccttgccagctgtgcccgagctggctgcaccccgggccaggcatccagcaaccttgagcagtggggtccggcttttcagaaggggccaggaacccgcgtggctgaggtgtgaccgaagcgtggggcagaggcgctgggccctggcgctttaacgctggtgtttctggttttaaatttcacgacccagtgacactgccaccctgctacctcgccagcagccctcctgggcttaacttcgggagagcagttttgctagccggccctgggtgccaagccctgcaggaggcgcagacccctggagacaggaccggactctgcagagcccgaccagcctcccagcttggccttttcctgacgcacgggcgcagaaggaaagccacagcaccggcttctctttgtaagtagtgtattttaaatagctttcaagatacacatattttttcctttaaaaaagtctgttggagcagttttgttcttgaattttgctggtcatcctcatggtcccgagcccccctactccgggtcgtggaggcggccgagggggaggctgggggcccacgtggcccgtcctggcggcacctgcagcactgggggagccgctgaaccccgtgcttcagcgctgggggagccgctgggccccgtcttccgccacaaaccatgcatggccgccacgtgagctcaaacgtccgtttatttcaaagcagtaataatttaaaattataaaaatctttccaccgctgaacgtttagagggtgaggttagacagaggacggggaggctggggacgccccagaggggaccatgtggcccacgccttcccaagccagggggccggtgggccgggcccgggtcctgccctggaacaggcgggacctgcagcgctgaccagccaagcgtggcgccgccggggcacccagtctgtgggtgccgtgtggcgctggctgagggtgggtgggaaaggccccgtgctttcccgacggccgacgtgggctcacgagttgcttgtggcgttctcgttgctgggcgagctggaggaggacgatgacgacgaggaggagaagctcaccccagtgaggccaggggggttcgtggccgtgttctgtcccgtgaggctttttcggcagacggggcagctgtcgtgctttgtggggacagaggcagggacgggagaaggggcaggttagaggcgggagggccgcggtcggggtgggggggcgggtgggcggggcactcacctgctccagccagggcacgatgcagccgtcgtggaacaggtggttgcagggcagctgccgcacacgctcacccagcgcgtagtcgtccttgcacacagggcactcgagcccggagcctgcgggagtgtgcagctgcggtcacagcgggcgtggggggcctgccgagccttcaagggcaggctactccacagcctcagccggaggccgcccctgagcccagcgaggggagaaaagccgtgtgtgtgtcccccgggctgccagaggggacctggacagaaccctctcctcccagcccaccttcagggaaatgctcgaggccgggtgcggtggctcacgcctgtcatcccagcactttgggaggccgaggcaggaggatcacctgaggtcaggagttcgagacctgcctgaccaacatggtgaaaccctgtctctactgaaaatacaagtatgagccaggcgtggcggcgggtgcctgtaattcccactactcgggaggctgagctctcatacctacgtgctcctcagtgacggggacggtggggagggcctggattttctctttatctgccggtggggggcctgtgttttcaaactgattgaggagctgaaagacaagaggcgagagtgccgggagctcctcgggggcccggcccggggctctgaaacgcgaggctgcaggacctgcaaaagcaccgaggccgcgtttgtcctgggccctgggccccttggagcccgcccggggtcggagatcactgtggagcccacgcggcccccccgctcctgggtcccctgacggtggaatgggggaatgggcggaggcccgcgctcctgggtccctgacagcggaatgggggggggggccgcgctcctgagtgccctgacggcggaatgggggggccgtgctccggctggtgggctactgtgagggtcgggtcctgccagtgacaaaatgctccaagggctcctcagcaaggctgagacgggtggcacttggaagcaggtcagggcgcgacctctcgggaagagggaccgcgtggcctcctgaccatgtgactgtgggcgagtcctccccgcggttttgctacaacgttccgcgtgaacacaggagaacccccaaagttgccaagactcagaaatggcaggaggaaggccggagctgccccctgtgcccgccagagcgtggaggctgtgcccgcatcccctttgacctttgtggggcttcgtgggtccaggcagtggggcagctcccaggggtgggcagcccagccctcccccagcaggcactctgggccgtggccacgctgtacctgtgtgatgatggcatccaggccgttggccccccaggcgtagtccatagggtttgagtgcaggactcccctggaggtggaaggtggggttcaagtggctgacgggcagctggggcaggtgcgtctatccaccccactcaccaggggcccaggctggggatggggacaggcaccccctcctactcaccagggaccctggctggggatggggacaggcacccccacccactcaccaggggcccaggctggggatgggaacaggcaccccctcctactcaccagggaccctggctggggatggggacaggcacccccacccactcaccaggggcccaggctggggatggggacaggcacccccacccactcaccaggggcccaggctggggatggggacaggcaccccctcctactcaccaggggcccaggctggggatggggacaggcaccccctcctactcaccagggaccctggctggggatggggacaggcacccccacccactcaccagggacccaggctggggatggggacaggcacccccacccactcaccaggggcccaggctggggatggtggcgggcgtgatgatgccgttgacgagctgctggatgatcctggaaaagagagcgccagtcacggggtgaggccgccccacgcacaggagaggcgccaggcctgccaggtccgtggtgagcaccaagggcagggccagcatcagcttctagattagcttctatttatttattttactatgagccagggtctcactctaatgccgaggcaggagagaagcagcttgatcttggttcactgcagccccaacctgctgggcttaagcgatcctcccgcctc[135 bp omitted]gcaacctctgcctcccgggttcaagtgattctcctgcctcagcctcctgagtagctgggattacaggcgcccaccgccatgcctggctaatttttgtattcttagtagagacggagtttcatcatattggtcaggctggtctcaaactcctgacctcagtgatctgcccgcctcggcctcccaaagtgctaggattacaggtgtgagccacctcacccagcctcagctactttttaaaaattagagatggggcctccctacattgctcaggctggtcttaaactcctgtcctcaagagatcctccctctttgacctcccagagaactgcaaatacagcactgagccaccgtgcctggcaaaattagccacttttaaagatgacatttccagcaggtgagacacacaaccataaaagcatcaaccgccaggagtagggccctgcgacggctcccccaggctctgttccaccaggagcagggcccagcgacggctcccccaggctctgttccaccaggaatggggccctgcgacggctcccccaggctccgttccaccaggagtggggccctgcgacggctcccccaggctccgttccaccaggagtggggccctgcgacggctcccccaggctctgttctgggcccaaggcctggacagcgtttgacgacacgcgtgtggacagcagtctccagagcacgtgggcctggcaggcacacggtgccccactctgtggtcaacccacacaccctgaaccggcatacttctgtctccgaagggccgtgtggggagtcacagggggctggagggcctggccgggcggcctctccagagagcctatggatgatgccacgtttccgtggaacccgtgctggattctaagcgccagaacttccgacctcaaggcgtggggccctcgcggccacccccggggccccctcacccttccagcgtggggacgccttcgtgccggccggtggcccgccgcgtggtgaggcgggcgcggggctgtcgggcgccgtaccggtgccgggacggatggtctctctcccgccggctctcagggtccctgccgtcgtcagcctgcgccccaggagggaacgtggggatctcgaagctgtcatcgaagatgccgaaagcaaactgtccgtagccctgcggcagcgtgaacaggtgctggtccacgtgctggggagaggaggggggcgtgacctcgggggctcaggcccgtgcagtctgctgggggcgctagggcacaaagacaaaggagaaagcaagacgggccctgctgggtgccgggtgggagggagacgcagacagggaggcaggaattgggcagagcctgccccgctggtgtgagatgcctcggtggaagtttcgctttcatccaagaaaccaaccaagcagcgtgggccgccccaatccctggcccgggcccctggagggaaaaatttcctccgccgtgcgggcagggagagccggggaggcgaggtggggacaggctggcgctcggggccccgagcaaggctgacacgatcgggaagcacgaggggcgggcgactcacctccaacggtggccggctctggtctgtgggagctgtggagggggcagaaccattttctgtgctcctggggagagagtgcaggtcagcagtgccggctaccctgtgcccccatgcgccaggcgctccctcccctcaaaagcctatgttgggagagcaggaattgtccttggcactgcttcccacccgccaccgccccagcatttggtgccgtaacccgctgctgcttccctcgccagtaaaccacgggtttctcgataaaccggtgcagaccccaacagcctcctaagcgtgagaatgtgggtagggcccccgtggccccttccccggagggcctgggtcaccagattagccgccgaggctgagggaggtgagcggctgcacaggttgccggcactcccctctggccccggcccggccatcacagaagagaacggcacgctgctgtctgcacagagaaaagtgctcccggagccacagacaccagggcctgacggccccacactcggcggggcggacgccagcacagcccacacccctacaacagctgaggcccggctggctcttccagcctcttcaacagggggctgcattacctggtctcttccggaagctcctcgataaaaccagactcgcatcttggacagatataatcctgcaggagagaacaggaggccgggtcacggtgacgccggcatcacctgcaaacccccccaagtgtgaggacagaggggctccggacccagcggtctctggctggccaggcacacgcaggccagggtggctcccaacccgtgggtcctggagggcggccgaggggacctggcctctgccagccacccgctgaccctttggtggctcccggcgatctgagcccctccgacctggccccaccgtgacgggcgtcaccagcgtcatcagcgccttggctgagcccctccgacctgccccaccgtgacgggcgtcaccagtgcctgggcacctcctcacacaggtggcaccactcggaggggtgccccaataccccacagtggcatttccaggacgctctggcagccccgcacacagcccgttcccctggctcgggggaggccacgtccacgctggccacacccctgcaagaccccatccccaggtccccctagagccaaggacaacacaaggccaacatggtgatgtcccagaggagacgtgaggaccctgcccagggacagccgtgggtgagtcccaaaaccacgttcacagttccccagcaccagcctcaagccacagctgtgccgagcaggacggatgccatcccctgtggatctcacactgcaacgggatccccagggctgaagggcctgctggagacactggctcacagggcggactcctcatggatggctgggcccctggtgatggcggagcgtgccgagcattcgtggggcctgggctgaaacgtgcatggtgcctcccggcctcaccaggggctgggcagatgccgacacacacttcccgcacagcctgcagaactggaaactggaagctaaatcaactgctctctatgaacgacccagtctcaagtgctccatcgcagcaacgtgaaaatggcctcacacggcacgtgtcatcacgccaggggctcacatgggggtcccaagaccacccccaggtaacacagacaaaaacaggagacaaggctcccaccgtgcatgggggagtgctgtgaggggagccaaggtcgaccccaggctctggggatgcaggttgcaccggggctgttcagtcttcgcaggggcaggggctgggacctctccagcaagcaagatcccggcctcacccactgactctggggagaagcgggggtctggcgtgcagtgcccaaggggagggccgacagctgggcccccgcccacaccacgccgtgcctgcctcacctgctcctgccactgaagcacaggctgggtggggagggactaaggccagggtgagcaaacgatgccagatgcacatgaacccaccgtgaggggagagtgaagaggcaccatctacaatatagaaaaagtgcggcccggctcctggtgaggccgggaggcaccacatgcgtttcagcccacgccccacgaattctcggcacgctccgccatcaccgggggcgcggtggctcaggcctgtaatcctggcacttcgggaggccgaggcgggcggatcatctgagatcaggagttggagaccagcctggccaacatggtgaaactctgtctctactaaaaatacaaaaattagccgggtgtggtggcgggcgcctgtaatcccagctacttgggaggctgaggcaggagaattgcttgagcccgggaggcggaggttgcagtgagctgagattgtgccattgcactgcagcctgggcgagggagcaagactccgtctcaaaaaaaaaaaaaaaaaaaaaaaaaaaaaaaaaaaaagtgctggccgggcgcggtgtctcatacctgtaatcctggcactttgggaggccgaggcaggcgaatcacctgaggccaggagttcgagaccagcctggacaacatggagaaaccccgtctctactaaaaatacaaatgttagccaggcgtggtggcacgtacctgtaatcccagctactcaggaggctgagacaggagaatcgcttgaacctaggaggcggaggctgcaacgagccgagatcatgacattgtaactccagcctgggcgacagagtgagactccgtatcgggaaaaaaaaaagtgcttacaactcaaaagaaagaaagaaagaaagaaaaaaaagcccaggccaggtgcagcagctcacacctgtgatcccagtactttgggaagccaaggtgggcagaccatttgaggtcaggagcttgagaccagcctagccaacatggccaaaccccatttctacaaaaaacaaattagctgggtatgctggggtgggtctgtagctccagctactaaggagggggaggagacaggcaggagcgggaggcaggaggcagaatggcttgagtccaggagatcgagaccgcagtgagctgtggtcccaccactgcgctagcctgggtgacagaaccagaccctgccaaaaaaaaaaagaaaaagagaaacagacaacgcaactaaaaacgggcaaagtcgggaggctgaggcaggagaacggcttgaacctgggaggcagagcttgcagtgagccgagatcgcgccactgcactctagcccgggcgacagagtgacactccatctcaaaaaaaaagaaaagtggggggggaaaggacgtgtacaggacatgcctccaaaaacacgctgggtaaacgcagccggccagccccagcgagatgccacttcccagggccagccaggacgagatgcaagaccccgtcaggcctgctgggagcccagaagtcccccagatggaactaccccatgacccacgagctagaactttcactccaggcgcagaccccagagaaacgaagacacctgcccaccaaatgttcacatggccagaactggcaggtgagagttcacggcagcacagttcatcatcgtcgtcggcagatgcaaacagctccagtgtccacccgcacctcagagcacgactcaaccatggaaaggggcaaggcccagaccaggccacggcgggggggaggggggattgcatcttgaggacatcacgtccagtgagagatgccagacacagaagaccacgcagcgtgtgatcccacgtctatgaaatgtccaggacaggccgagccacagagacagagaggggatgtgtgagcaccagggcctgggggaggggacggggagtgacggctggcagggctgaggtgggttctttttgcagctgtgagaatgctgtggaattagactgtggtggtggttgcacaactttatgaatatactacaaacgtttcaccaggtgaattatatggtgtgtgaaaatactgagataaagctattaaaataaatgggccaggcgcctgtggtcccagctgctagggaggctgaggtgccaggatcgcttgaacctgggaggtggaggctgcagtgagccaagattgcagcaacagagtgaggcagcatctcaaaaacaaaaacaaaaaaaagaaagaaacaaagaaaaaaagggctgggcacagtggctcacacctgtaatcctagcactttgggaggccaaagtgggcagatcacttgaggttaggagttcgagaccagccaacatagggaaataccgtctctactaaaaatacaaaaattagctgggcacggtggtgggtgcctgtaatcccagctactcaggagctgaggcacgagaatcgcttaaacccggcaggcagaggttgcagtgagccgagatcataccactgcactccagcctgggccacagagtgagaccgtgtcagaaaaagaaaaagaaaaagggaaaggggaaggggaagcagccaacgaccaccactgtggccctgagcttagtgtgggagcagtgtggctctgccacagtggccgtgacaactctccccaggcgtcggttcttggggtgtgtttggggtgtcgggattgggacgccccacgtaaacacgctgagacttcacagtcaaatctgaacccctggtttctgccggtgtcgggtctatcggggctcctctgggctcaggggttgccgccgtccgcccgccagctgaccgggagcccagggccgctccatcgcctgggtgggtctctgggaatggaggggtagctcagggctcaggctctccctgcatggtgactccccaggctagcaccacccagtggacctggaacagctgcactggcccccactgagggcaggacgtaagtcagctgtgcagctgccccgaccaccatctctcctgctgggtgcatccacaaggtcaggcagccccagaagggcctgagggagaagctgtctccctctgaggaccctggcttgccagccccagccccgaatctctcctggacaagcacgaggccctgcacacgcccacgtggcctggcacagcgctcggccgctctggtccccatgtgccgagctcagcccctctgtgcatcactggctttctgtcgggctcccgggttcccgtctcagtccagggcacaacgcatgctcccgccacccgcactgccggctcacgacagcccgacctggccacatacacactcatctgccccagccctggcctcctcttggcccccgctgtcctgcccgcagcggccgtggggcctggtgccacagcactgtccagaaccctctctctgcagcacccactccagcgtcggggcctgtgcacgtcggccctgctgctggaacgcccaccctaggggtttcaaaggtcacctctctgctccaagcctctgccctgtcacagaggacagcctggacactcactcatatctgaaatccgggtgccatcgaggacgccaagggctgcgacccaactcctgcgtattgtcagggctctgggctgtctctcaggcccccggccagcccctccagggccaccgaaggccggaaccgaggctctggtcacgaaggcaagtgacaggtggatcccggatatccagggtggaggttgagcctctgctggccgacggtgggaggggctggacctgggggtctccagccgccctcctcctccaagggcacagccaagagaccgcttggtctcgtattaaatcggggcagctgcaggtagaaacgcctgggcaagggggcctggtgaaggagctgccccaccttctccgggggcagcacgcactgggggcccccacagaggccccattggagcctctggccctagcagaagacggtgaatccattcacctctccgtcagagaacagatgcaggaggtacgatcacccggcatcatcaccatagcaacagctggccaggcagccagggtaggggggaccctgccagtgccgggctccacccatgcacccctgcagcgtgatggcctcatccccgggtgggacctggcagggcagcagaggccccttcatccacggggcctgcacggggcgcatgtcctgagggcccagggccaggcgcatggaggggagtgggctggcgacctacaggccccagatgactgacagtgaccagggcaggcaggcccctggtgacagtgactcggcccctgtgggtggcagggccctcgggaagctgtgcacatcaggagaccccagggagagtcatggtgcagtgctcggcctcggtaggagcccccgtgctggctactgttttcctaaagggtgcccaaagcttcccggctgatccacagtgtgtgggccccgcagccccagaggcacgggcacgtgcggcgcctgcacccctttcttcccgccctcagcagctgccaccacatcccacattcacaccgtctgtccctgggccccacgcaccacacactcccaagacaagctggatggacgaggcgtgagcgaagccactgcctcagcccaggctggggccccgcctcacaccccagggcgtgcctcggcccaggccccgaactctgccttcttcttcccaggtggcttcaggcaccaccactagggactggaaccccacaggtgcccatccgtgccagtgccaggggtgctacggctcgcccgaggctcagaggaaggtcctcatggtggcagagttctaagtgggaggaaattcagcaccggcatctgcccgaggcagaccccagcgccagccggccagagagggcagccgacatccacaggttcccggggtattgctggtgcccgatcacaacgccaggctccatgttcacagggtgctgcagggagcccgttccggagaacccagctgtgcagagccgctccagggtgctggccggacgcttgagaggcaggggcaggctgtcactgtcacggtatctggcacaaccgcagacacacagagcaagcagcggccagagacagacccaggccgtcttctgaagactcgggccaggccgccgcagggaccaggagaagacagggtgggccggggggcagctggggagacttcccgcctggccccatcagtgacactggccgtagcagccctcacttcctggtggctccccgcccacgccggctcttccccgccaccgtgggcggcagggcccagcacccccaccgtcctctcaccgccacttggggacactgcggaggttgcaggcgttcgggggtggggggtcggcaggcagagctggaaccaccctaggaaccacccagagacggggaggtcaggggcaaggacggcacgcagggccacctccctgcgcccgcctggttcctgggggctcagtgccctcagcagctctcgcccacaccctacagtcacagctccagtcagtgcctcctcagcaggctcgagtctgggtctgcgcagccgcctgtggcctgagctccagctggcctgtctggttcctgccgccacacgccccactctggctgacgctccctttgctgctcagacacccagacaccctcgtcatcgccttttttttttttttttggaaggagtcttgctctgtcacccaggctggactgcagtggcacaatctcggctcactgcaacctccgccttccaggttcaagcaattctcccgcctcagcctcctaagtcactgggactacaggtgcctgccaccacgcctggccaatcttttgtatttttagtagggatggggttttaccatgttagccaggctggtctcgaactcctgacctcaggtgatccgtccacctcagcctcccaaagcgatgggaccacaggcgtgagccaccgcgctcggcctcatcacagcctttcatgggggcaactgctgcccctgtgccgtcgtcgcctgagcccccgaccgcaagtgtggctccccgctcaggacaccctcacgagtcaccaggagagcggccaggtgccggccactctgcacacacgtgcccaccagatgccacggggagcgaatcgcatcactaaacccacttggcaggtgaggagactgaggccaaggctgcccagcagagaatgacccagctgcgcggggcctcagcctgatcccagagcccaggacagcaaaggaggcccggaacggcccagctgcctgggagaagccctcgtgggcaggcacacagcccatggcagccagtcccccctgcgtcagaggcaggcaggagcttcccgacagccagcccaggtgtctcagcagcagcagtgccgcccctgactcagccgccgggcaagctccccagcggcagagacgccccgtttcgagggcactggttgtggctggggactttccccattgccagatacggagcagccgtccctccccagaacaaacgccaggtgtgcccatttcccagcataaaaaattcgtttttgagacagcgtcttgcttgtcacccaggctggagtgcactggcaccatcacggctcaccgcagcctccacctcccaggctcaagcgctcctcccaccacctcagcccccgccagtagctgggactccaggagtgcaacaacacaccccactaattgttttagtcttctgtagagacagggtcctgccacgtacggagaagttctgacactgccatgctgtctacgggcgccttgttgcgtcctgctccaaaggcacaagcagatgcccttgggatcacccgcggggtggacacgggcaggcccccgcagccctctctgcagttatttgctcttaaggaatctaccaacgtccatgattaaatatttgtcaatcactgttccatgctggctccctggccagcctgtaaattctgtgagggcaaagaccacagcggcctgtcaccacagagttcctttcactacaggaaggccctccccaggcccagtgacagtcggaggaggtcaaggtcctccgtgtccaaggccacggggcgaggaagtggctccaccacaccaggatccagtcctgtgcgggctctaggagcagctaaatgtgcagccgagtcaaggcagtgtcggccccccacagccaccactccaggcttcccaggggcttcccaggcctgtcccagggctcaaggggctgcaaggggctgccctgcaactcacccaggctggcgggctgtcaggcaaccagcctctcctgccacggccagtggggacagaaagctggaagaggcaagagcgagacccctgggagacagaggagtaaggcaaggctcagtctcagctccccaaccttcgccccacacccgagatttcactttatttgttcctcctgctggggaggggaagccctgtggcttcagtagagaggaaaccacacctctctctttccactcctgggcctggccccgctctcccgccatgccccaactctagcactcgctcctcctctgtgacccagagacaggcggcttctcctgactccctccagccccttcctgggtctctactcccggggaactgcactgcttctggggggcttggacttctcttacgggtcaaagcgtagcaacagccgggcggctacgtacacagcacagtaaatcctcaatgcctgcagcctcttcccctgggcacagggtggggagtccagacccctccacctcctgcggctgctcccctcaagctggccaagcggctcccgactgagccggctctgccactttcccgctgagccaccacgcgcctcagtttccccatctataaagcacgggtggctcgactaaatcaccactttgcacgtcagcctggcgaagggcaacacgggttaaaaatgcagaccaccgccgggcacggtggctcacacctgtaatcccagcgttttgggaggctgagccagaagaatcgcttgagcccaggagttcaagaccagcctgggcaacacagggagaccccattcctaaaaataatattagaaatgcagactgctgagcgcattccacacctactgactccgaaaccctggaaaaggggcctggaaatagcaccttcaacgagcgctgctcccacctcccccaaggtgacatcaggtccgcgtgggaaacactgccctaaacgagcaggaagtagcactcggcacgcccaggcccagggtcctcttcggtgaggggcggctgtaaacacctggaggaagggtgggctgcgcagccaagccccgggaggggaggaacgcaggctctgctcacaaagccccgccggcgggccgcggtcggaccccgggacagtgcctggggcgttccgggcctgggcctgcctccaaggcggcggccagggctccacgaggcgagcctgcagcgaggcgccggcgcccccaaccacgcgctcggcgggggtcccctggcgttattctcggggtccgagccccgccaggcccagcccctgccccgcgccgcgccaccgggcaataccctctctctgctcgccgggcctcagtttctccgtttgcaaaaccaggctcaccgggcttagggatcccacctgggatcctcgcggcctctcgggtcgggaacgccgcggatgtggggtcacccggccgcgatcccgctgcgccgctccggccaggccctgcctcccgcccgggcctcagtctcccgcatgtacaggacggggttcgcgcgcgcaccgcccgggctccccgcggattcagcctgggccggcgctgccccgagcctcagttttcccgtcgtggtcagctcgcgcaagaggcgggcgcaagcgacccccaccccggccccggccttgcctcaggcctgcggcgcagaccctgccgcccgccgccccggcccgggcctcaccggcaggcgcgggacgatctccacggagcagcagtggcagaagtaccgtccgggatgcggcgacgcctcggccatggccgccgccacctactccgcgccgcccgccccccgcgcggcacccgccgccggccgtttgctgctccctcgccggccgacgcgcccgcgcacgctcacgcacggcacgcacggcacgcggggcggagcgggggcgcgggagcggcgaaagctgcgtactcggcgggcagcggcccgggcgacggtggccgctgagagacaaactaggcccggccgttgggcggggctccaagcgggggcggggcttccggcgggggcggggccaaagcaggcggcggaagagacgagaagcggggcgtgcgcggggcggggccgaggccctcctcccctcccgaagctgcccaggccttcgtgtccctcagtgcttccctacctcatcgccgtctcccctcacggtacttcagcccactgtccccaccgttcctggggctcgccaggcgccctctcccccgcccgctgcccggtgcagcgctctcccgacgcccgcgtggctttcttccaggtctttgctcaaatgtcagcttacaaggtcttctctgctgccctcctgctccgtggcactgattccctcccgatgcactgtcaggtcagctgcgcagcaaagggatttttggacccgcagcagcgcctgacacacagcaggcattccctcagcgctgcggaatacaggcagacccggggctcagggcgctgtctgggcctcactgggacccgtggggtcagacagaggctgaggtctgtgggttgtggccttgtttccaagatgctccacgggctgacggcccaggcgcctctcgggtgcggagaaggcaggaaacctaacccctgcttccaaatttaatcagtagaaacggtatcatcacccagcacaggccaggatcatttctgaggttagttctggcccaatcatgcatgcatttcttttttctttttttttttgagacggagtctcactctgtcacccaggctggggtgcaatggcccgatctcggctcactgcaacctccgcctgccgagggttcaagcgattctcccgcctcagcctctcgagtagctaggactagaggcacccgccaccacaccggctaatttttgtatttttagtagaaacgggg[136 bp omitted]ctcattgagcaactactgcacaccagaccctatgctgaatgcacgcagatacccccagtcccatgagattggacaggagcgtggaactcaagggtgactctggctctgcctggggaaagagagagagggcttccgaggggtaaggacattggaaccagggctgagggatgaataggatttggttggagttggacttcctgcaaaatgaggcattggagcgagactgttgaggaattaagagttggagcctgtgcatttagattttttgtttgtttgtttgttttttagagatggagtctggctctgttgcccaggctgcagtgcaatggcgcaatctcggttcactgtaacctccgcctcccgggttcaagtgattctcctgcctcaggctcccgagttgctgggattacaggctgggcaccaccacgcccgcctaatttttgtatttttagtagacggggtttcactatgttggccaggctggtctcaaactcctgacctcaggtgatccgcccgcctcggcctgccatagtgctgggattacaggcgtaagccaccgcgcccggcctgcatttagggttttgaatgtccagaggttggggacaggggcttcagcctccttccagtcgtctttgcagcagcgcgaatccagtcattcctgctctgaccaccagagagcgcacgggccccgtccctgggaatccaggaaaaccccaggctggggaggggcgaggcttgccagacgcagcccctgcaccagccttcacgctccgcaagtgcaggaggagcagcaggcctggttcaaacgacgccaaaccacgaactggctgtgtgtccctaggcaagtggcctaacctctgagaaggcggcagaacctgacggttttccgttggctcggagcagacatgaggaccgctggcacctcctcagccctctctgtgctctgctgcctgccccgagtcacctgcccctcgctgacccctccccagcctcactggcccccttgggtgggctaagcaggttcccacctctgggccttgcaaggctgtgcccttccccaagtcccctctccttcccctgcttttttttttttttttttttttttttgagatggagtctcactctgttgcccaggctggagtgcaatggtgcgatctcagctcactgcaacctccgcctccaggggtcaagcgattctcctgcctcagcctcccgagtagctgggatcacaggcatgcgccaccacgcccggctaatttttgtatttttagtagagctggggtttcgccatgttggccaggctggtctcgaactcctgacctcaggtgatccgcccacctcggcgtcccaaagtgctgggatgacaggcgtgagccaccgcgcccggccctttcccctggtttttaggaggctgccccatccaccactgcaccccacttctcagagccccctttccatcccccacagccatcctcacatctgtgggttattaatggcgtctccccatatgtgaggccaatacccagcgcaccagtaggtgttcagtagattcccaaatgcaccaacagttgccgagtgtctactgtgtgctgggctcaagcaggtgctggaaacacagtgggaatgagaaggaacgtagggattttgtatcaaactaagcagggcgaggtggctcacgcctgagaccaggagttcaaaaccatcctgagcaacatagtgagaccctgtctctacaaaaatagaattaggccggggacagtggctcatgcctgtaatcccagcaccttgagaggctgaggcaggaggatcacttgagtccaggagttgaagaccagcctgggctacatggtgaaaccgtgtctctactaaaaatacaaaaattagccaggtgtggtggcgggcacctgtgatcccacctactcaggaggctgagacagaaggatcacttgagcaggaggcagaggttgcagtgagctgagatcggaccactgcactccagcctgggccacagatggagaccccatcttttttgttttgttttgttttgttttgttttgtttgagatgggtctccctctgccgcccaggctggagtgcagtggcatgatctgggctcactgcaaattctgcctcctaggatcaagcgattatcctggctcagcctcccaagtagctgggattacaggcatgtgccaccacgcccggctaatttttgtccttctagtagagacggagtttctccatgttaagtaggctggtctccaactcctgacctcaggtgatccgcccacctcagcctcccaaagtgctgggatcacaggcgtgaggctaatcgttttaaatttttattttgtagagataggatctggctatgttgcccagagtgatctccaactcctgggctcacgggatcctcccaccttggcctcccaaagtgtggggatcacaggtgtgagccagagtgcccggccacccctttatcccaaacacaccaaaaagcaggctgctcttccctgaaggcagtagcacattgatcaaatcggccagtgggcactgacactgctgcacacaaatgcacacacttgcaccctgccccaggccccaccggccaccctggttccacagacggcaccgtttctcccatttcctctcaccagggacctcgacaggtgtgggcttggttccgtgagctctcttagcccctttttcaattcaggatcccgtccccgtgaaccctgggggcctcggcaaacatgagacgagaggactcctaaaggaatgacacgcgccactccctccggggcagagaggtgtgttgacagctcattctcacgtcccaggcagaccaagcccaggtggaccacgtcccaggcagaccaagcccaggtggaccacgtcccaggcagaccaagcccaggcggaccacgtcccaggcggaccacgtcccaggcggaccacgtcccaggcggaccaagcccaggcggaccacgtcccaggcggaccacgtcccaggcggaccaagcccaggtggaccacgtcccaggcggaccacgtcccaggcggaccaagcccaggtggaccacgtcccaggcggaccatgtcccaggcagaccacgtcccaggcagaccaagcccaggcggaccacgtcccaggcagaccacgtcccaggcggaccaagcccaggtggaccacgtcccaggcagaccaagcccaggcagaccacgtcccaggtagacctagtggttgtgtattcacttctcccaacccccctgggaagaaataactgcagctggccccattgcaccaatgaggaaactgaggcccagggaggaagccgattgcctgaggcggcagctttgggactggactgtggctgcctcctgaggaaggaaacagttcctccctccaccctcatcctggcaggggttgggccaccgttgcttcatcaagtgtcgtggagcctccgctctgtgccaggagcggggcctgtgccacaaacgtctgctgaaaccagccatccacccaacagtatcgagcaccatgatcggaagagtaaaggccccaaactgggccaggggcggtggctcattcccgtaatcccagcactttggaaggctgaggcgggtggatcatttgaggtcaggagttcgaggctagtctggccaaaatggtgaaacccatctctactaacaaaaaaaaaaaaaaaaaaaaaaaaatggccgggtgcagtggctcatgcctgtaatcccagcactttggaaggccgaggtgggtggatcatctgaagttgggacttcgagaccagcctgaccaacatggagaaaccctgtctctactaaaaatacaaagttaaccaggcatggtagcaggcatctgtaatcccagctactcgggaggctgaggcaggggaatcgcttgaatctgggaggcagaagttgcagtgagccaagatcttgccatttcactcctgcctaggcaacaagagcaaaactccatcttgttaaaaaaaaaaaactagccgggcatggtggtgcctgcctgtaatcccaggtactcgggaggctgaggcatgaaaatcacttgaacccgggagcagaggttgcagtaagctgagattgcaccactccactccagcctgagagacagagtgagtgagagacttcacctcaaaataaataaataaagtccccaaacacacttgattttagcccagcaagactcatgtctgttgcgggaagtcagggaccccgaacggagggaccgcctggagctgtggcagaggaacataaattgtgaagatttcattttaatatggacatttatcagttcccaaattaatacttttataatttcttacgcctgtcttactctcatctcttaatcctgttatcttcgtaagctgaggatgtatgtcacctcaggaccaccgtgataattgtgttaactgtacaaattgattgtaaaacgtgtgtttgaacaatatgaaatcagtgcaccttgagaaaaaacagaataacagcgattttagggaacaagggaagacaaccataaggtctgactgcctgcagggtcaggcaaaaaaagccatatttttcttcttgcagagagcctataaaaggacatgcaagtagggaggatatcgctaaattcttttcctagcaagcaatattaatattaataccctgggaaaggaatgcattcctggggagaggtctataaacagctgctctgggaatgtctgtcttacgtggttgagataaggactgagatacgccctgatctcctgcagtaccctcaggcttactacggtggggaaaaactccaccctggtgaatttgtggtcagacgtttccctattttttgttcaagatgtttatcaagataatacgtgcaccgctgaacatggacccttatcagtagttctgtgttgccttttctcctgttccctcagaagcaagtgatctttgttctgttttttgccctttgaagcatgagctctactccatgttctcacaccccctcccctcttgaaacccttaataaaaaacttgctggtttaaggctcagggggcagcacgatcctaccgacatgcgacgtcaccccccggcggcccagctgtaaaattcctctctttgtactcttcctctttatttctcagccagccgacacttatggaaaatagaaagaatttatattgaaatatggggggaatgggtccccccgatacatgtcagatttcttttatttatttatttatttatttatttatttatttattgagatggagtctcactctgtcgcccaggctggagtgcagtggtgccatctcggctcactgcaagctccgcctcccgggttcacgccattctcctgcctcagcctcccgagtagctgggactacaggcgcccgccaccatgcccggctaattt[131 bp omitted]atttatttattttttttgagacgggggtctcgctctgttgtccaggctggagtgcagtggtgcgaactcggctcaccaaaacctctgccctccaggttcgagcaattctcctgcctgagcctcctgagtggctgggactacaggcacccggcaccacacccagctaatttttgtatttttaatagagatggggtttcaccatgttggccagactggtctcaaactcctgaccttaagtgatctgcctacctcagcctcccaaagtgcaggaattacaggcgtgagccactgcgcccagctgttttgttttttgagatgaagtctcactgtcacccaggctggagtgcagtggcgcgatcttggctcactgcagcctccgcttcctgggttcaagtgattctcctgcttc[137 bp omitted]cagcctcccaaagtgctgggattacagatgtgagccgtggcacttggccagtggggttgctttagggcccagctcacaccgcacccggctgatggggttgttttagggcccagctcacttcccagtgttcccacaccgcccaccaggccaggccttcaggcctgagccatgttatcagcatcacaggctccggagtccagcaagtctttgcctcctggagcccaggggttggcaagttctagctcagaggctgcagacaatagacagtaagccaatgccaagtatctttgggctcaggaaggtgggaccgggtgtccctgactgttctgtaccaagccacaacccgcttcccatcctggaggccgaaggtggtaccgcagggtgagctccctagagccccacagaacacgctgctctgggtcctaaaggctctccttgcatgaatgcaaacctgctgactacaaagatggttattattatcagctccaaggtacagaaactcggtttaaactggcttcatctccctgcggaggaggagttcaggcacagctggatccagggacctccaatgtcactgggaattgttgctgtcccctttggctctgtggcccacggggctggcctctccctagccatcagaaagagccacctgcaatttcaggctcacacctctccagccccagcaggaagcaggtgtccctgtccctctcccagcaaaattccagggccgttggccaggcgtggtggctcacacctgtaatccccgcactttgggaggccgaggccggcggatcatgaggtcaggagttcgagaccagcctggccaatatggtgaaaccctgtctctactaaaaatacaaaaattagccaggcgtggtggtgggcgcctatagtcccagctgctcgggaggctgaggcaggagaatcgcttgaacctgggaggcagaggttgcagtgagctgagatcacgccactgcactccagcctgggcaacagagcaagactccatcttaaaaaaaaaaaaaaattccaggactgactcgtcctggtggttttgtgttttttttgagacagagtctcactctgtcacccgggctggagtgcagtagtgggagcagaaagggggaaccagccccaggctggccctcgtcgtgtggtccatgggaggcacaggggtcctggaagcttctgaacctggtgctgaccctagtcctgactctgcaggtctgtgtgactccaagaaaatcacttcccaccctccaacctcatccctataaatggggcgcctgcctcacagcctcccagcaagcagcaaaggggactcaccatggtcccgttctgcacgagcacccattgactgggtaattaacaggaatctatgcacgccatggccctactgtgcgcctggcactgtccacatcccacctggaacctctaacactggggtctgtgcccatgttacagataagaaaacaggcataggctgggcacggtggttcacgcctgtaatcccagcaatttgggaggccaaggcagctggatcgccagaggtcaggagttcgagaccagcctggccaacatggtgaaacccatctctactaaaaatacaaaaaattagctgggtctgctggtgcatgcctgtaattccagctactcaggaggctgaggcaagagaattgcttaaacccgggaggcagaggttgcagtgagccgagattgcgccactgcactccagccttggcaacaagagcgaaactctgtctcaaaaaaaaaaaaaaagaaagaaaaagaaaacaggcctagaagggtcccagggcctggcacacagtgggcacccacggctgctataacaaatttgcacaaactgcctggcttaaagcaacacacgggctgggcgcagtgtctcatgcctgtaatcccagcactttgtgaggccaagatgggcagatcacctgaggtcaggagtttgagaccagcctgaccaacatggcaaaatcccgtcactgcaaaaaaaaaaaaaaaaagtagccgggtgtggtgggaggcgcctgtaatcccacttagtctggaggctgaggttgcagtgagccgagatcgcacctctgcactccagcctggacaacagagtgaggccctgtctcaaaaaaataaaaatggccaggcatggtggctcacacctgtaaccccagcactttgggaggccaaggcgggtgaatcactgaggtcaggagttcaagaccagcctggccaacatggcgaaaccgcgtctctactaagaatacaaaaattagccagttgtggtggcaggtgcctacaatcccagctactcgtgaggctgacgcagaaggattgcttgaacccgggggcggaggttgcagtgagccgagatcgcgccattgcactccagcctaagcaacagaacgagactacgtctcaaaaaaaaaaaaaaaaaagttccacacgggtctggctgggagaagatcgaggtgttggcagagctgcattccttctggcagctccaggagagaatctgttccgcgcctttccaggctcctagaggccgcccacattccctggcttgagcccccttcctccatctccaaatcccgcaatggca[141 bp omitted]tcccaggttcaagtgattctcctgcctc[216 bp omitted]tttaccatgttggccaggctagtctcgaactcctgacctcaagtgatctgcctgcctcggcctcctaatgtgttggaggttcacaggtgtgaacctaatgtgttggtggttcacaggtgtgaaccaccgcgcccggccaggcatctcctcttctacggacccttccaggacagtgggccatccgtataacccaggatgaacccctgtgtgaaagccctcaactcagtcccatctgcagagcccctttggccagggagggtgggacacccacgggttctagggatgagggccccatggtctctgggaccgccgttctgctgaccaccccccactgctctccccctcactcacagcacaagcgtctgtttccagcgcacacccctgccgctccgtctgacgttcgagtctcaacctcaacgtctctttcctctgggaagccttcctcagtctcccccaggcccgggtcaggcctggggcacctttgccatctgggcatcctccgccacagaacaacactggattgtcactgtctgtttacctgtcaggatgtacctggagggagacagaagcctggggggtgagcagaggccacgaggagccacggtgggtgtctgagccagggagaagtgttatggcagctggggtaggaagtgggccgcaggggccaggctgcgggctggaagtcctaggatgagcctcgggcctggatagggtggggagaggggcagagccgggagaggggaggtcatcactggggtctcaggaggaggcggcgctctggaaagggtcagtgacctgttagaggtcaccctgcacagagcctctgggttagggaagacagagccgggagcaggaggccactggcagctggcctcggtttccccggagagggccggaacccacgccagccagacaatgaccctttgattcgcacagcccaggccggagtggccaagccacggcggggtcaggtcttggccaaggtcacactgtccagcccccgcacatcctcagtgagaacacagggtcccatccctgccccactccccaatcccgggagagtcccgggggaatgccagaggccaaggccaggtcgagacggcggggtgtcccccgtcagtgagaacacagggtcctgtgcctgccccactccccaagccggggagattcccgggggaaatgccagaggccaaggccaggtcgagacggcggggtgtcccccctcagtgagaacacagggtcccgtccctgccctgctccccaagccggggagattcccgggggaaatgccagaggccaaggccaggtcgagacggcggggtgtcccccctcagtgagaatacagggtcccgtccctgccctgctccccaagccggggagattcccgggggaaatgccagaggccaaggccaggtcaagacggcggggtgtcccccctcagtgccactaaggcagaacttggcccctggccactggctgctgggggacacaggctgggcagctaaggtggaggaaagggtacaggtgtgtcttctgtgggcacagatctcactcaggccagagaaggggctgtgccgtggggctgctggacacgtccgtttccacctgcggggtgggcaatgccggcacagcgagtggccagacacaggcatgcccagcagacacccaaccgctctccaccacctcaaccttctgtattttcctgaaagcatttaccactccttgaagttatagattaatttgtctctgcattttgttgtccaaaccaggagctcggtgagggtgtgatggggtctgccttggtcaccgtggcaccccagcaccccgcagggtccctctggccaaaagagatgttcactgatgccctagaagcaggaacagaggggctcccctgcgctcgccaagggcgcctgacaaatctggaggcccccatgacagaatcagctccagagtaggaaatgtgtctggctgcacgaaagccccctcgggcgcagcgcctccaggcccacgcagatgtcgctgtcatacattgttggaaacgcctctgctggaaacagtgtttgctgaatcttggagggagaggaaaaaacctagtaaacattcttgttgaggtgatctgggggaatgtctgcaaaggcttggagggctgatggggcagagctgcccaggggcccaggacaaaggccaggcgtgcgcgcgcacacacacacacacacacacacacacacgcagtggcctccctgggggccgtggctgggcgaggcctgctgttgtccgagatgctggaaggagctgtgtctctgggtctgtcccggccgcaccccgttctgtcccacacccaaccactccccacccacaggccggctccagcggccaggtggacgggtgcgcggcccgcgctgtgagcagggaaccatatccagctgaggttttgggtgtgtggggcgggtcgggaacaaggaggccgggttggggggctcagaccacacttggaccatgaaagtgaccacatgcaaatcacagaaacgggatgcagggatccacagacgtgctcctcttgggtccccgttacctcaccgccacccctgaaactgaagacccccaaacccactttaattcctggagacggcccctcgatccacccaaaaggctgccaccacctcgaacccacacccctgtcccggttccgccctgggtccagccacatctccccaaatgcattctctggctccggaaggggacccgggcgctcgcccccaactgccccccgcagcggccgggcccggcgcctgcccaccccgcgcgggacacggcctcgcccccgccactcccgcgccgcgccccgccccgcgccccgccccgcccgcggcccgcgggacctttatagggagcgccggccgcgcgctgggaagtcggtgccgctgccgtctctgcgttcgccatgcgtcccggggcgccagggccactctggcctctgccctggggggccctggcttgggccgtgggcttcgtgagctccatgggctcggggaaccccgcgcccggtgagtggggcggccagaggggcgggcggggcgggccacccacgtggggctgcgcggaatgcggccggggggacgtcggggggcgcggcggcggcggcgggggcgagggcggtgtccggcgcaagctggagccgggaaggtctgaaggagggtcaccaagaggtcagcagagcagaggtttctaatcacaatgaccgctgacatttattgagcgcttagtgtctacctctcccctccctgaacctgtgccatcccgatagtgccggagctctcttcatctccgtcttccagatggggaaactgaggctcagggtcacacagcctgtagcaggcaaagccagggttctagccgcgaccgtccgggtcggtcctggtgccgagaggtagtgctgggtgtcgggagccaggccctccagctggggctgagagctttcccgggtcctgggtagacggggcatggagtctcacacctgggacttgccgggaggtgccaggcaggagacggccccactcctggcctcagtttcccctcctatgatgggtgccaaggtgctgcgttccacaagctggtccctggcagtgtctgtgaaccagcaagcgctctgggatgggggctgtggccgttcctgcccccagggacgggggaagaaatggggggctctctggctccccaccccccatccctgcagccccaccccaccccagccctgcgccaaagggagagcagagccccctccccgaaggccacgtccctggggagacagtgagctcatgcaaggggaatgttcccaagttggagtgagtaagaggcgggccaggcggtgggggggctgccaggcgcggggctccgcgtgccctcgccctcgggtgctgtctagacagagggcagaggcgggagaagcggctccagggcctgctgaccctgacatgcccagtgcctggtgtttggtggtgtttgaggggttgggcagggtgccagcccctggcctgggggcttggagggtacgggaagggacctcctggggtgggtgggggttggtggtgaggctgtgggggggggcacgtggagctcagaggggaggagacatttccagggttctggagccagggtggggacacccatgtggttttctgccccttcttcctgggtgggggtagatcattccgtgcgtaactactcagcaccacctgcatgcatctgtgggcgggccagaagctgggtgtcaggagtggcccaggagagcaccccgttccccggcccgcaggtggtgtttgctggctccagcagggccaggaggccacctgcagcctggtgctccagactgatgtcacccgggccgagtgctgtgcctccggcaacattgacaccgcctggtccaacctcacccacccggggaacaagatcaacctcctcggcttcttgggccttgtccactgccttccctgcaaaggtgagacctcaggccagaagcagggcagacgtctcagctcaggaccagccacaaacagtcatggtggtcgagggccgaacgtccagggactgagcccgtcacaggggtatgtaggaggctgcagggggatcccagcctcagagagggactggggggacttcccggttcccaggctccagcctcttgcagctcaggactcaggaagagaccacgtggctccagcctttgctggggctgagctctctgcctgggtggctcttcccacctggtcgataaatgtctggcttgcacctagctcctgggaaggtgggtttgccattctggcctgtgaccccaaatgtccacaccagggaccttcactgcagactccagggtctgcggtggggttacagctgcatgtttaacaagcatttgcctcgggaccctgttttgagaggatgcctcccacatcagactaggggctcttggttggcgagtggcacagaacgaatgaataagattctccgcactggaggatgatggttttttttttttttttttttttttttcctgagatggagcctcgctctgtcacccaggctggagtgcagtggtgcgattttggctcactgcaacttcggcctccgaggttcaggtgattctctttcctcggcctccccaggggctgggactgcaggcgcgcgccaccacacctggctaatttttatgtttttggtagagacagggtttcaccac[138 bp omitted]ggtgttgggggatgtctaggagtttgccagatggggccggtatgggagagtggatcaggagagaacatggcttgaggttaggtcctggtgggtggggtcaggcagaggagccaaggggaggctgaagctgagggctgcagacccgaaggccaggctgaggaactctgctggcctctgagatgtgattaatcccagatcagcctggctgggtggtcctgaactcactgccacatacccctgctccctccagacccccctctggcttctgggagaaggacagtcttcaaaaagtgcctggcctgggcatgagacggcccaggaccccccacccccaacctcatctggccctggggacggaactcaggcccccttccgttctcgctcgcataaaagccaccctggccgagcatttccagatgtgcctgtgagccgctgtgccggggccgcccaggtgcggcccacatgccctgcaagggctgcgtggcgggcgctggccatcccctaaggagtgccgcactgccttggaagtggggctccctcgtcagccccactttacacacagagaaactgaggctggcacataaactcaacagctgtgttcagaggccctaccagacccccagataacagaaagggggttggtcatctgggtcctggctgcagctttcaaactgaggtgcttgggcccctgcactcatagctgcgacccggcctcagtttccccatctgtaaaatgatgacttgggaagatgcgataagcctaggaggcgatgagcattcacattgaaagcgggggcggggaccccagagagagcttccctagcaggacctcaatatccctgtctgagcagcggggctgcggggcagctcctggttcagaggcctagggctgtggggggccccctcccctggaatcgctccccaggccaggagggccgtccagcgccccgccctccccgacgcctcctgggggaaggtcctggcagccccagactcgcgcctggcaagggcggaacaccccaggctgacgcagctggggcccctccggccttcccagaagagcgcgtgcatcgggagcagacgtcagccagctgcaaggaggagcggcccggggctgcgtagctccgctggaccccgattccgggcagagacccccccccgccccggcccgcgcgcaccgagcccagcccccgccccccagcgcaggcgcagcgcggacctcggccccaccggtcccgcgcccggaccctgagccctgcccctgggaacccgagggccccgactccgactgaccctgacctgggacggcgcccccgcctccgccctgcagaaggggcgcagggaggggccccgaggccttcgcgcggccccacgcccgggaccctcccgcgcccggccccacgcgcgtgtcctctgtccgcagattcgtgcgacggcgtggagtgcggcccgggcaaggcgtgccgcatgctggggggccgcccgcgctgcgagtgcgcgcccgactgctcggggctcccggcgcggctgcaggtctgcggctcagacggcgccacctaccgcgacgagtgcgagctgcgcgccgcgcgctgccgcggccacccggacctgagcgtcatgtaccggggccgctgccgcagtacgtgggggcgtggtctgtggaggggcggggcgggacctaccggacctgcgcgtcatgtatcgaggctgctgccgcagtaggcgggggcggggcctggggcgggaccacccggacctgagcgtgacgtatcggggctgctaccgcaatgcgtgagggccaggcctgcgggggcggggcctgctggaggggcggggcctgctggaggggcggggccgctgccgcagtgcgtaggggcggggcctccagcccaggacaggtcacatgggtggcggtggggcctgagtaagggcgtctttatacttccgagggagtatcacggggtagggtcttttgtagggttgggatttggaaaatagtgggcctctgggggctcacactgggcaagaggtatgtggcatggtcagagcgggagcgtgactcagagaggggcttgtgggtgtaaccagaggggcatgatggaaccaggggggtgagactgggtcatgtaaggggcggggctcttggctggggcgtggttcctgggtggagatgggcggggatttgtgggtggagtttgggtgggcggccccgcagtcgcggaggggcggggctttgggtagcataaggggcaggagctcacgaaagaggtgtggctcctgggtacaatgggaagggcagggcttgtgggtggagcctgaggggtggaatggagaggggggctcacggggggcgggggggtgcttgtgtctcctaccagagggttttcgcatcttgggggttaagggtgggtcttggggccaagagccctgcggggttctcagcgagatgtcccctgaacttcccctggcacccggcctgcagagtcctgtgagcacgtggtgtgcccgcggccacagtcgtgcgtcgtggaccagacgggcagcgcccactgcgtggtgtgtcgagcggcgccctgccctgtgccctccagccccggccaggagctttgcggcaacaacaacgtcacctacatctcctcgtgccacatgcgccaggccacctgcttcctgggccgctccatcggcgtgcgccacgcgggcagctgcgcaggtgcagacgcagggcgggggcacaggcctgtcctgggggccggagaaccccctgccctgcgccctcaatgctcttatcgacccttgcaggcacccctgaggagccgccaggtggtgagtctgcagaagaggaagagaacttcgtgtgagcctgcaggacaggcctgggcctggtgcccgaggccccccatcatcccctgttatttattgccacagcagagtctaatttatatgccacggacactccttagagcccggattcggaccacttggggatcccagaacctccctgacgatatcctggaaggactgaggaagggaggcctgggggccggctggtgggtgggatagacctgcgttccggacactgagcgcctgatttagggcccttctctaggatgccccagcccctaccctaagacctattgccggggaggattccacacttccgctcctttggggataaacctattaattattgctactatcaagagggctgggcattctctgctggtaattcctgaagaggcatgactgcttttctcagccccaagcctctagtctgggtgtgtacggagggtctagcctgggtgtgtacggagggtctagcctgggtgagtacggagggtctagcctgggtgagtacggagggtctagcctgggtgagtacggagggtctagcctgggtgtgtatggaggatctagcctgggtgagtatggagggtctagcctgggtgagtatggagggtctagcctgggtgtgtatggagggtctagcctgggtgagtatggagggtctagcctgggtgtgtatggagggtctagcctgggtgagtatggagggtctagcctgggtgtgtacggagggtctagtctgagtgcgtgtggggacctcagaacactgtgaccttagcccagcaagccaggcccttcatgaaggccaagaaggctgccaccattccctgccagcccaagaactccagcttccccactgcctctgtgtgcccctttgcgtcctgtgaaggccattgagaaatgcccagtgtgccccctgggaaagggcacggcctgtgctcctgacacgggctgtgcttggccacagaaccacccagcgtctcccctgctgctgtccacgtcagttcatgaggcaacgtcgcgtggtctcagacgtggagcagccagcggcagctcagagcagggcactgtgtccggcggagccaagtccactctgggggagctctggcggggaccacgggccactgctcacccactggccccgaggggggtgtagacgccaagactcacgcatgtgtgacatccggagtcctggagccgggtgtcccagtggcaccactaggtgcctgctgcctccacagtggggttcacacccagggctccttggtcccccacaacctgccccggccaggcctgcagacccagactccagccagacctgcctcacccaccaatgcagccggggctggcgacaccagccaggtgctggtcttgggccagttctcccacgacggctcaccctcccctccatctgcgttgatgctcagaatcgcctacctgtgcctgcgtgtaaaccacagcctcagaccagctatggggagaggacaacacggaggatatccagcttccccggtctggggtgaggaatgtggggagcttgggcatcctcctccagcctcctccagcccccaggcagtgccttacctgtggtgcccagaaaagtgcccctaggttggtgggtctacaggagcctcagccaggcagcccaccccaccctggggccctgcctcaccaaggaaataaagactcaagccattttggggtgtccaggcctcagtttgtctcctctctcaaggcttcaggccgcccccacggctgtgggatgggcagcctggggcctggggtgccgcatgggtgctctggaggcacgggaagagagacccagcattagtccttgggcagcctctggccgcctctgggcctcagtgcctctccaggcagtggacaagcccgggaggggctgaggcagagcgggaggggagggagagaaaggaggtcttttgggagggcacacaggatagacaagatggcttagggcagccctaagacaccagctggcttgggacccagaaatggaggcccggtcttgaatgacttgggtgtaacgatagcagtaataaaaataacaggattagggcccgggtggggtagctcacccctataatctcggcgctttgggaggccaaggcgggcgggtcacttgaggccaggagttccagaccagcctgggcaacatagtgagaccctcatctctacaaaaaaaaaaaaaaaaaaaaaaaagacccaggcatggtggcatgctcctgtggtcccagctactcaggaggcggaggtgggaagatggcttgagcccaggatgtcaaggctgcagtgagctgtgttggcaccactgcactccagcctgggtgacagagtgagac[133 bp omitted]aactccaatctcggtgagccgagatcgtgccactaaactccagcctgggggacagagcaagaccccatctcaaaaaaaaaaaaaaaaaaattagccaggtgtggtgtcatgcacctgtagtcccagctacttgggagggtgaggcaggagaatcgcttgaacctgggaggcagaggttgcagtgagccgagatcgcaccactggactccagcctgggtgacggagtgagactctgtctcaaaataataataataataataataataacaacaacaacaacaaaaaggcccagcgcggtggctcacccgcgcctgtaatcccagcactttaggaggccaaggctagcggatcacgaggtcaagagatcgagaccatcctggccaacatggtgaaaccccatctctactaaaaatacaaaaaattagccgggtgtggtggtacatgcctgtagtcccagctagttgggaggctgaggcaggagaatggcttgaacccaggggcagaggttgcaatgagccgagattgcgccactgcactccagcctggtgacagagtgagacgtcatcttaaaaaaataataggccgggcgcggtggctcacgcctgtaatcccagcactctgggaggccgaggtgggtggatcacgagatcaggagatcgagaccatcctggctgacacggtgaaaccccgtttctactaaaaatacaaagaattagccgggtgtggtggcgggcgcctgtagtcccagctacttgggaggctgaagcgggagaatggtgtgaacccgggaggcggaacttgcagtgagccgagatcgcaccactgcactccagcctgggggacagagcgagactccatccaaaataaaaataagtaaagataaaaaaataaaataataataaagaaaataaaatctaaaaataaaaaaataataacacaataacaaactgtgacaataacatcacctgggacttgctgtgcaccccgcgctattctctggttttcagaggatgaccacgaggcttgatgtgtggccagaccctcttgggactcctcggcgcggccggtgcaagcccgccctggtgtccagcagcccccacgccctgcacagggagctcagggcttcctggcctccgtttcccagcggactcgcctgcggtgtggttaggcggctggagggaggtggaggaacggcattccaggtgggaggctgcaggagtgtgggttgcaggggcgcaggggtagacccagaggggttcacggtggggggcatgggaaggtggaaaggggctgcggaccgagccgcgacacgaatgccggtggaccctgcagctgaccgcccacgggtgaggctggaagtcagttaacattttactgggtttgcttctgccctttgcatgtggaatgggtgtgccccaccgctgcccgtcccaccccaaccctgaacatcaggcttcccgtggggcccagccacggaacattccaggcctggagcggccatctcatttgcatgccgcaaggttgtggctcaggcggcttctcctgggggcctggtggtcccaggcagggggccgggctggggactgctccgccgaaccacgtcccagatccaggccacaaaggcggacacctgcgtgtacacgtcgggggtcttggggtcgccgcaccagaggcccgagaaggaaacgaggccgtgagcccggttcctgcacaccaggggccctccggagtcggcctggagtgaaaggagaggtgaggtcagggcctctgggagctgctgcaggcacatctcaccacggccctccctgcctcagaaccctctgtggctccctactgctctccaaggaaaaagtaaattcatttctcccctccaggccctgaggacccagcccccacccacttctctgccctccccgctgagcctcctcagtgctccacggcctttgtatagcctggagacctgttcctgccctgcgctggatgctgcctgtgtgaacattcgagtctgcagtgttttgggcagtgcacaacctacacagctgtacgcggcagccctctactaacaggtctctctgccttgcgtgtgtttcctcagatcttctaaggattccttcaagtctcagctcaaaggtgctctccttggagagggctccccgtatactcaccctaaaatccctcatcctaccctcctgccatctagaatccgctctgataccatcaactggatactaatagtgtagcagttttacagatggagaaaaagaggcccagagaaatcaagtgacttttccaaggtcacgcatcgggaaagtggacagtctcatttctcctggactcgggctgctgggctaagtgtgtgtcctgaaccaagtcgctctcttgcctgcggtaaaagaccctccagggccagtgtctcccttggcacctggggattcgtttatctggcaaggttttaggagtgggagctgcttcctctcaatctgttactaccctctactgaatactgcttgtataaatacacaagtgcttggctctttgtgcagtgcgcaacctgcacagctgaacatggcagccctgcatgacccttgccaactccctgccttccctgggcctcagcttctccgtctggtccaacatcaatgggactcagttcccaaggcccttcctggccctgaccctctctgtgggccttggtttccccacacagtaagtgggtggagcagggaggggatcttaccgagcagaagccccgtctgtggctgtccccactgcgggtgcagagcatggtaagtgtcaggtggcccttccaggagctgttgcagacgtccgggtccagcactcggaccttggcctccatcagtccaggcggcagctcctcaaagtcagacacgaagccccagccagccacccggcaccgtgtccccgctgtggggggcctggcccttctccctggcggcctcagcagccccactgcagggcccaggacagcagagccgttcagctgcagggagagcatgagttcaggccactgggctccctccccacccccgctcctgcctcagtttatccatgggacccctggtcctgcccttgtgaagcaaaatcaatggcggccaccatgaggccgggtcaggaggccccgttccttctgccaacacaggcccctacccctcaggcctccagggtcaccgt[137 bp omitted]ctgcctcagcctcccaagcagctgggattacaggcgtgcaccaccacacctggctaattttggtattttagtagagacggggtttcaccctgttggccaggctgttctcaaactcctgacctcaggtgatccacccacctcagcctcccaaagtgctgggattacagagtgagccgccgcgcccagcctcaaagagtctttcaaactccatctccttccttactctaagccctcccacggctcccgattgccctcaagacaaaacctctttgctcaccagccagggcctctgagggctctccagcctcagcctcccctttggccaggcaggatgaatttacagctactccctgggcctgccacacacctcccctcacaccagacccccagcctgaaacacttttcctattcagccatctcagcatggatgccacctcttccaggaagtcttcccagactcccaggctggcacgtgagtcttctctgggctccctgcagcctgttgaggccggtttacccagtgaagactgagtgacaccccgggctctgtgtggcccagcaccgggcctctggccctggccctggcaattggcacacagctgatgctcagttaatgggcctgggaaggacggctccaatccctgtctctggttctctgatttgtgcgtcttgggttcattcctgacattcttgatgtctcgctcagcctcagtttccccatctgtgcgatggcctctgggtgaaccagcgctggttccaggcttcagggtttcacagatgagaaaaattcacccaaaagctttggctactggcacttgctcctcctccttttttttttgtttttttcagagtcttgctctgttgtccaggctggaatgcagtggcgcaatctcggctcacggcaacctccgcctcccgggttcaagcgattctcctgcctcagcctctggaatttaattttgggatgctgggtagaagcgtcagggaaggggtcgtccctcgagcaggagggggccaggcgggtctgcatggatgcaccacgtgtgggaggagcagcttcccacccggaggactccacccagggacttttttttttttttcagatggagtctcactctgtcacccaggctggagtgcagtggcacgatctcggctcacggcaacctctgcctcccaggttcaagtgattctcctgcctcagcctcccgagtagctgggatgactggcacccaccaccaggctcagctaatttttttatttttagtagagatggggtttcaccacgttggccagtctggtttcaaactcctgacctcaaatgatctacccgcctcggcctcccaaagtgctggggttacaggtgtgagccaccacgcccggccccacacagggactttaagcgtctcctccacacagggcaggggcccgagaggcacattcattccatttcagcataaactttgagcgcctgctgtgtgccataaatggccataaaggtgataaaaaatccctgcccgttaggttcagaggaagcgggaatgaggaagcgggtggtccaggggttagcaggtgacaagcaggtgacgacggggccggaagggtggtccaggggttagcaggtgacgacggtgctagaagggtggtccaggggttagcaggtgacgacggggctggaagggtggtccacaggttagcaggtgacgacggggtggtccaggggttagcaggagatgacggggccggaagggtggtccaggggttagcaggtgatgacggggctggaacagggttgcagggagggggtatgtggtccagggcggcctcctgggaaggtaacatttgagcaaagacttgacaggcgtgaggggaaaggctcgcggtgtctggggaactggtgcactgggtacagctggtgcagagctcggagcggagactgtgctggggatgggatggcccatccgggaggtctgctggcctcgagtcagaaaggtgacaggcatggattagcagggcctgtgggcaccaggaggatttgtcctgcaggaggtgggagccactggggggtccagggcacaggaggaatgggacctgacgtccaactgtctttaaaacctaagtcaggccaggcgcagcagctcaggtttgtaatcccagcactttgcggggctgaggcaggaggattgcctgagtccaggaggtcaagaccagcctgggcaacatggtgaaaccccgtctctactaaaaatataaaaattcgcctggcgcagtggtacacgcccgtgatcccgacactttgggagaccaaggtgggcggatcacttgaggaccggagttaagaccagcctggccaacatggtgaaatcccatctctactaaaaatacaaaaattagccaggtgtggtggtgggtgcctgtgatcccagctactcgggaggccgaggcaggagaatcgcttgaacccgggagatggaggttgcagtgagccctgactgtgccactttactccagcccaggtgccaaagtgagactccgtctcaaaaaataggccaggattgggaggcagaggtgggcggatcacgaggtcaagagatcgagaccatcctggcaaacatggtgaaaccccatctctactaaaaatacaaaaattagccgggcgtggtggcgggcgcctgtaatcccagctactcggggggctgaggcaggagaatcgcttgaacctgggaggcagaggctgcagtgagccgagatcgtgctactgcactccagcctggggacacagggagatactgtctgaaaaaaaaaaaaatagcccagggctgcttctcctggaaaacactaaacggcggatgacgtcggtgcagtggggcggccctgggatggggaacggcgctggcttcccccgaggcttcggcactggcttccgggctggggccgcggagctcacagaggcaagacagaggataaggagtagacgcctgtcaccaagctgggccgcctggtcaaggacataaagatcatgtccctggaggagatctgtctcttctccctgcccatcaaggaatctgagatcattgaccttttcctgagggcctctctccaggacgaggttttggagattatgccggtgcagaagcagatccgcaccggccagcgcaccaggttcgaggcgtctgttcccaccggggactacaatggccacgtcggtctgggtgttgagtgctccaaggaggtagccactgccatcatcggggccgtcatcctggccaagctctccgttgtccccatgcacagaggctactgggggaacaagatcggcaagccctacaccgtccctggcaaggtgacaggccgctgcggctctgcgctggtgtgcctgatccccgtgtccggggcgctggcatcgtctgggcgcctgtgctcaagaagctgctcatgatggctggtatcggtgactgctacaccttagccaggggctgcactgccaccctgggccactttgccaaggccgcctctgatatcctctctaagacctacagctgcctgacccctgacctctgtattccccaagtctctctttcaggtattcactggccatcttgtgaagactcacaccagagtctccgtgcagacgcccggctccagctgtggttacaacatagggttttatacacgaaaaataaagtgaattaagcctggaaaaaaaaaatggccaggcacgatggctcacgcctgtaatcccaacactttgggaggctgaggtgggtggatcactgggtcaggagttcgagaccagcctggccaacatagtgaaaccccatctctactaaaaacacaaaaaactagccaggtctggtggcgagtgcctgtaatcccagctacttgggtggctgaggcaggagaatcacttgagcctgggaggcggaggttacagtgagccgagatggcgccattgcactccagcccccgtgacagttcgagactctgactcaaaaaaaaaaaaaaagaaaagaaaagaaaagtaggccgggctcggtggctcacgcttgtaatcccagccctttgggaggccgaggcaggtggatcatttgaagtcaggagcttgagaccagcctggccaacatggtgaaaccccgtctctactaaaatacaaaaattagatgggcttggtggcgcgcacctgtaatcccatgtacttgagaggctgaggcaggagaatcacttgaacccgggaggctgaggttgcagtgagccgagattgcgccattgccctccagcccgagcgacagagcgagagactgtctcaaaaactaaacatacgtcagatccacccccggggctcacccgcagcaggcagatgtcgttggcgtgggtcatggggtggtagtcggggtgtgtggtgagagcatcgatgccaaacacctgctgggtgggctccgcagtactcaggacgtgggcgcccagcaccaccaggccagtgcggaggtctctgcagggaggaggtggtgggtgagacgggggtgagggctgccc[137 bp omitted]acatggagaaaccccgtctctactaaaaatacaaaattagccaggtgtggtggcacatgcctgtcatcccagctactcgggaggctgaggcaggagaattgcttgagcctgggaggcggaggttgcagtgagctgagattgcaccattgcactccagcctgagcgacagaacaagactccgtctcaaaaaaacaaaaaaaaaacaattacttttgcatcaacttaatattcttttccttttttctttttttttttttttgagacagagtctcactctgtcccctaggctagagtgcaatcgaggcttactgcaacctctgcctcctgggttccagtgattctcctgcctcagccctccaagcagctaagactacaggcgtgcgccaccactcccagctaatttttgtattttcagtagagacagggtttc[142 bp omitted]tattatttttcctacctccaatatagaattaactgcaatagttgtggtattaatttgaatcattattataaaaacatatttagaatgaagataatacttattatatttattataagttctatttcaattataatattaactacagtaatttcaatattctcctttttttatttctttaatttttttttttgagacggagtctcgctctgtcacccaggcaagattgcagtggtgcaatcttggctctctgcaagctccacctcccgggttcacgccattctcctgcctcagcctcctgaatagctgggactacaggcgcccgccaccatatccggctaattttttgtatttttttttagtagagacagggtttcaccgtgttagccaggacagtctcgatctcctgacctcgtgatccgcctgcctcggcctcccaaagtgccgggattacaggcgtgagccaccgcacccggccttttttttttttttttttttgagacaaggtctcactctgtcacccaggccgcagtggtgtgatcacagctcactgcagcctcgacctcccaggctcaagcgatcctcccacagcagcctttcaagtagctgggaccacagaagcacagctccggtgcggaggactctgcggggaggagggggtgggtgagatgggggtgacggctgcccgtctgggcctcagtccactcatctatgaaatggaggcccagtaatccatttaatgctcacgccggccccgtgataatattaggttggtgcaaaagtaattgcacgaaaaaaattaaatggcaaaaaccacaattaacttttttttttccgacagaatctcactctttcccctaggctggagtgcagtggtgccatctcggctcactgccacctccacctcctgggttcaagtgattctcctacctcagcctcccgagt[131 bp omitted]tcccgggttcacgccattctcctgcctcagcctcctgggtagctgggactacaggcgcctgccacc[175 bp omitted]ttcaccatgttggccaggctggtctcatactcctgacctcaaacaatccaccgtgtcccaacgtgagggggactgcaggctggcgggggagctggggacactgcagcccaggaccaacctatcccgtgcctggtgggggctcctgcaggaggggacccacccaccctggccccaatatacattttaatagttattataacaatatgtttaaaacgaggcagggcatggcggctcacacctgcaatcccagcactttgggaggcagaggcgggtggatcatttgaagtcaggagttcgagaccagcctggccaacatggtgaaatccagtctctactaaaaatgcaaaaattagccaggtgtggtggtgggcgcctgtgatcccagctactcgggaagctgaggcaggagaatcgcttgagcccgggaggtggaggttgcagtgagccgagattgcaccgttgcactccagcctggggaaccgagactgcctcaaaaaaaaaaaagaacatagtgacagttacagtaacagaatatgtacttgttgcgcctgttgcttcttctgtgcttcttttgcctccctgccttatcctcctgttttccctttgttgccctttaaatccagcccctgctgagactccccctcctgcaggagccacggcgcccccagctcccccaccagcctggagtccccctcatgtcgggatacggtgtccagaaagaaggggcccgacaggtgagctcacctgtggctgaagcagtgggcggccgagaccacccagcgggctcgcagcaggaagcctccgcagtgatgttggcccccgaagcgcacggatgccatgtagggcctggagtggggggtcacctcgtggcccccgatgatctgggccccccaggagcctgctggagggacggcctgagtcagggacgaggcgggaggaacggatgacggggctggggtcagggcagggggagaagtagcggccaagacagagacagggggtgagattagagacggagagacccagagagctggagacagagcccagacaagccccccagatgcgctgggaggggctcccgagcccgggagatccagggctgggctgggcagagaccccggccggatttccatccatttccagcagaggcagccacgggggctcggcagatggagcaggtggagctctccccagggttctcccgggactgggggttcccgggtgtggcccccgtacggggacttggcgggggcctgggtggggatcccggggggctcctcaccggggggcttcacgggcagcatcagggcggtggccacagtcagcagaggacgtccccagcccctcaacccgagccccatggcagacgcaggctggcgtctccccgcagaggtcttcgggccgtggctcccaccctcagccaacggccggaaagggggagcctggctgtggcctgtggtcgggaggccccaccagcaacgcctggagcccaggcgggcgtttctgagaaatcgatggtctcaggtggtggctggtaataatcatgttgataataatcattgtcccctagtccggaaacagggagaggaggagacagctctggggctgcaagtgacctcgggaaggcaattgacccttctgtgcctcagtttacccagcctccacgtggcccagcatgtgtggggagctttccgaggaaccgaggtcacagcggcactcgagacccgcagctcgcctccggcccccaccccgcaaaccccagtcttcccatctccaaacccagggccgacctcagggctgtggggacagcgaggaaggccggtctcctgggaagctctgatgatttctgcctttattttattttatttttataggtggggttttgctatgttgcccaggctggtctcgaactcctgggctccagcgatcctccctcctcggccttccaaagtgctgagatcacagaagacagccactgcacctggcagatttctgcctttattcagcagttattgagtgcctagtgtataccagacctcatgctaggaggtgaggatgaggcagtgaccgcaccccagcctgtagcactgacgttctgtgggatccggagtccagtgggacatggctgtacatgggggtcttcaccttttttttcttttctttttttttttgagatggagtcttgctcttgttgcccaggctagagtggaatggcaccatctcggctcaccgcaacctctacctcccgggttcgagtgattctcgttcctcagcctcccgagtaactggaactacaggcgcccgccaccaca[175 bp omitted]aatcttgctcttgttgcccaggctagagtgcagtggcgcgatcttggctcaccgcaacctctgtctcctgagttcaagggattctccttcctcagcctcctgagtaactgggattacaggtgcccaccaccacgccccgctaaatttgtgtgtttagtagagacggagtttctccatgttggtcaggctggtctcgaactcccgacctcaggtgatccacctgcctcagcctcccaaagtgctgggatgacaggcctgagccaccgcgcccagcccggcaggtcttcacctttcagtgggagcgttcttagtggcaaagttcaggtcgtaaattgcagctcacacagccgggtgatggcgttcacggcagtggctagcagtggggtgctcgtcagcgcttaataatgaacaggctggggccgggtgcagtggctcacgcctataatcctagcactttgggaggccgaggcaggtggatcacctgaggtcaggagttcaagaccagcctggccaacatagtgaaaccccgtctctacttaaagtaccaaaattagtcaggcgtggtggcaggtgcctgtaatcccagctacttgggaggctgaggcaggagaatcgcttgaaccgggaggtggaggtggcagtgagccaagattgcaccattgcactccagcctgggtgacagagcgagacaccatctcaaaaaaaaaaaaaaaaaaaaagtcatcattgaacgctccagacctgtgttttaccaaatgtaaagtgttctcaataaagaatgaagtgaaatgaagcaacaggaaatgcgtggaaaggaaggtatgaaaaggccccacaacgaactcgggctctgcgagatgcgggcggcctctggaagctaaaaaacggcaggaaacgaattttctcctggagcctccgggaaaagccagccctaccgatgccctgacgttagcccagaagggcctgcaggggcttctgacctccagcactgccagagaataaattggtgccatttcgtttattattattattattatattttcttgagatggagtctcgctctttcgcctaggccagactgcagtggtgcgatctcggctcactgcaagctccgcctcctgggttcatgccattctccttcctcagcctcccaagtagctgggactacaggtgcccgccaccacgcccggctgatattttgtatttttagtagagatggggtttcaccacgttagccaggatggtctcaatctcctgacctcgtgatctgcctgcctcagcctttcaaagtgctgggattacaggtgtgagccaccgcgcccagcctcatttattatgtatatatttattttgagacagggagacagggtcttgctctgccgcccacgctggagtgcagcagtgcaatcaaagctcactgcagcctcgacctcctaggctcaagccatcctcccacctcagcctcccaagtagctgggaccacaggcacctgccaccaccaggcccggctcattatttcattttttgtggagacggggttttgccatgttgcccaggctggtcttgaactcctggcctcgagcaatcctccagcctcggcttcccggagtgctgggattacaggtgtgagccaccatgtctggcccaagttggtatcattttaaaccactacgtttctgggaattcgttacagcagctgcaggaaagattttgggaaatggaaagctgtttccagggcctggggacaggtgggaccccagctcagggtccgtgtacttggggaccatttcctgctctgctgtggtctactggaccgtctggcatcgctgtgaccgcatgggccgtgctccatcaatattgtttttttgtgtgtgggtgtttttttttttttttttagatggagtctcgatctgtcgccaggctggagtgcagtggcgtgatctcagctcactgcaacctcagtgtcccgggttcaagcgattctcctgcctcagcctccccagtagctgggactacaggcgtctgcccccacgcccggccaattttttgtatttttagtggagatggggtttcaccatgttggccaggctggtcttgaactcctgacctcgtgatccgcccgccttggcctccgaaaatgctgggattacaggcatgagccactgcgcccggccctgtttttatcttttagagacagggtctccttctgtcgcccaggctggagtgcagtggtttgatctcggctcactgcatcctctgcctcctgagttcaagcgatcctactgccttagcctcccaagtaggtgggattacaggtgcctgccaccacgcccggctaatttttgtgtttttttgttttgttttgttttatttgtttggtagagatgggtttt[141 bp omitted]ctggtctccacggtcgtcgcgtcagcacgagtgggtcccctggacttgctcctacctcccctgctgccctccgtcgcggagcactgaggcagagacctggaaaacgtccccagctccacgggcgttagaaggagaattgcccgaagctgcaggcgtgtggaactttgttccctcacgatgctgtccctgtcccggtcgctgatggggacacagtagggagagggtaagcgccttagccctgccacacagtgaggagccagggggccggggctgctgcctcagaggagctcccactgcctctcgggaccgattctatccagagctgggccatttccttcccttttggtgaacagttgtgaaataaacaaccgtcctccagcgtctcagaaaaccgagctcctggcagccctgaggagggggctgagtgggggtcactgttcccacttcccaaactgaggcccagagaggggagccgatttgtctggggccacacagcacagggtcttgacccatgagccgctggactgcgattctcctggagggtctctccatggcagatctgagcggctcttcaggagctcagacaccagccactgcagggagtcaacagcaatggtgacaacagcttcctttattgtatttaattttacatttttattttatttattttgtttttttgagacggagtctcgctctgtcacccaggctgcagtgcagtggcaccatctcagctcactgcaagctctgcctcccgggttcaagtgattctcctgtctcagcctcccgagtagctgggattacaggcgcccaccaccacgcccagctaattttttgtatttttagtagagatggggtttcaccatgttggccaggctggtcttgaacttctgatggcaggtgatccacccgcctgggcctcccaaagtgatgggatgacaggcgtgagccaccgcgcccggcccctcccctgcgaaaaattgtttttcaagacgagatgttgcctggtggctgagactgcaatcacagctcactgcagcctctgcctcctggctccgccttccctgtagctgggaccacaggctcacaaaaccaccagggtaattaaaaaaaaaaaaaaagctag[139 bp omitted]gtggcgggcgtctgtagtcccagctactcgggaggc[136 bp omitted]tctcactatgccgcccaggctggcctcaaactgacctcgactgatcctcccaccttggcttcccaaagtgctggtgtaataggcatgagccactgagcctggcctcactttatttttatttttttgagacagatgctttgtcacccaggctggagtacagtggtgtgatctctgcttactgcaacctctgcctcccaggttgaagcgattctcctacctcagcctcccaagtaggtgggactacaggtgtgtgccaccacacctggctaatttgttttgtatttttagtacggacaggatt[133 bp omitted]tatccacaggacattgcttcttcttttttttttttttttttgttgttgttgttgagagggagtctcgctctgtcacccacgctggagagcagtggcgcgatcttggctctcagcaaccttttcctcctgagttcaagagattctcctacctcagtctcccaggtagctgggattacaggcatgcgccaccacgcccagctaattttttttttttttttgagatggagtttcgctcttgttgcccaggctggagtgcagtggtatgatctcagctcactgcaaactctgcctctcgggttcaagcgattctcctgcctcagcctcctgagtggctggaattacaggcgcccaccaccacccccagctaattttgtatttttagtagagatggggtttcgccatgttggtcaggctggtcttgaactcccaacctcaggtgatctgcctgccttggcctctcaaagtgctaggattacaggcgttgccaacgcgcctgatctttttttgtatttttagcagagacaggttttgccctgttagccaggctgctctcgaactcctgacctcagaggatccacccgcctcagcctcccagaatgttaggattacaggcgtgagtccccgtgcccggacctgcttcctatttcttgaaatggaagatagctgccttaagaatacacattgcactggctggacgcagtggcttgcgcctgtaatcccagcactttgggagactgaggcaggcggatcccctgaggtcaagagttccagaccagcctggctaacatggcaaaaccccatctctactaaaaatacaaaacttagctgggtgcggtggtgtgtgcctgtaatcccagctactcgggaggctgaggcaggaggatcacttgaacctgggaggaggaggttacagtgagccaagattgcaccgttgcactccagcctgggcgacagagtgagactccatctcaaaaaaaaaaaaaaaaaaaaaaagaatacacatagcacaacccaacactacctgccttccagccagactggagagggctggcttggccgctactgggggtccctgagctgtccaaaggccctgctccccggagctctctggcctcagttttcccatctagggaatgggttgccctggggcaatgccgagagtgctgatgagaattcagcaaggttggctgggcacagtggctcacgcctgtaatcccaggactttgggaagttgaggcaggcgggtcacctggggtcaggagttcgagaccagcctggccaacatggtgaaaccccgtctctactaaaaatgcaaaaattagctgggggtggtggcgggcacctgtaattccagctacccggaaggctgaggcaggagaactgtttgaacccaggagatgcaggttgcagtgagctgagatcgcgccactgcactccagcctgggtgacaagaacgagactccgttggaaaaaaaaaaaaacagcaaggtactggatgcggcatgctggtggggactggggccctggcgccccttgtaaagcgcctgtttgcccatccgtaagctggatcctgccccgtccttcccatggaagccatcacagtcagagaagagggtagaagacaggaaaccatccattcattcactcaactcattccgtgagcatttattgagcacctactgtgtacagacagtgttgtgggccttggggactcagcagtgaagaagacaggcaagttcctgcccttgtggggctgacattcagcagagaggcaggaaggaaacgctgaacacaacatgtaaatgacattgtctgtcagaagaatt[137 bp omitted]acacggtgaaacctcgtctctactaaaaatacaaaaattagccaggcatgatggtgggcacctgtaatcccagctactcaggaggctaaggtggaaggatggcttgaacccaggaggtggaggttgcagtgagctgaggttgcgccattgccctccagcctgggcaacagagcaagactctgtctcaaaaaaaaaaaattagccacgtgtggtggtgcacacctgtagtcccagatactcaggaggctgaggtgggaggattacctgatgggggaggtcgaggctgcagtgagccaagatcacatcactgcactccagcctgggtggcagagtgagaccctatcttattcaaaaaaataaaaacaacaagggtaccgagggcacccagtgacaatggggaagctggggaagttctcccagaggaacacacaaggcgtctaacagcaggtgtctggatggctgaagcccaagctggttgtggggcaaggagaggtgagcagggaagagacaggattgtctgggctcagctttgccttgtggggctgcagggcactggggaaccatagatggtgtttgagctggggcaggccagggcatatttctctggtgaaagagtggagtagggagaggaggtggggagacccggaggcgacatggctcagggttggggtgggggccataaggcctcagctaaagtcatggctggggagaggcgaggggggtctctgactcagggacaggggaggagtgaggttttgggacccacctatagcttccggtcgtccaaggctccagagggtggccagatctgcaaggagtggtggggcgtgctgggcggagccccggggtagagctctacggaagtaggaagggcaggggcgccctcagggaaacctcactcctcccctgtccctgagtccaggaaggggtcaggccaacgtcgctctggaagcctggaggcggggccgaggtgcaggggcggggccgacattgcctgggaggcggggctgaggtgcaggggcggggcctacattgcctgggaggcggggctgaggttcaggggcggggccgacattgcctgggaggcgaggccgaggcacagggggcggggccaatgtgcaggggcggggccgacattgcctgggatgcagggaggtggggccgatgtcgggggcggggccatggtgcagggggcggggtcggggcggggccgagatggcctaggctgctgggaggcgggactagggtgcagggtgcgaggctagcggggtgatgcgggggccgagattgcccaggaggcgggtccgaggttcagggggcggggctagggcgcagggggcggggccgacattgcttcggaagctgggagtggggaccgaggtgcaggaggcagagcctcagtgcagtgactgctccccacaggacgcggatgggcgctgcagtgcctgtgggtgggtgagcgcagtgaggcggtggaagtgagggtgtgaagggcaactcgaggcagcttctctccggtccactacacaccccaccttgtcccacctccacacctttgccaggccgttccggccacctggaacgtctccctccaccgtttgcccggcccatttccccggttcaagtggcatcacctccaggcctgtgtgtgctggagtcgggaggtgtgggcggcgcgagtttttcgtgcagggccttgagagtggcaggaggactttagcttttgctcggagggaggtgtgagtcctggaggtttagagctggggcggtgggagaaatgatcccagcagtcccttaccctccccacggcctcctcacttcctcctatttttacacaaaatgcctccaccacccttcaaaccctgaatcttttattttattttatttttgagatagggtctggctctgtcacccaggctggagtgcagtggtgtcttcacagctcaccgtagcctcgatctcctgggtccaactgatcctcctacctcagcctgtgagtaactggaactacagatgcatgatacctcac[174 bp omitted]gtgtcaggagcctgtagtcccagctactcgggaggctgagacaggagaatggcgtgaacctgggaggtggaaattgcagtgagccgagatcaccccactgcactccagcctgggcgacagagtgagactctgtctcaaaaagaaaaattacatttaaaaatgtatatatggctaatgactgctgtaccgaacaaaccagtccccaaaagcaaatgaaataacagctgccaccaagtaccacggtcacacctaaaaaccaattaacacctcgacagctcctcacgcaggttccgtttactcgggagtaggagccggccacccgatgcagggtcactatgaccccccaagcccgtgcctcgccctgtctcttcttcctccttataattaaaatcttgaaggaccccgatggcagcctgtcccaccgccctgcctgggtctggcccctgcagcttgtgatgcttctcagacccattcccagccctccggggagtcacagaggggtgagatcagacagaggtttgaatccgggggtggcctttccttggatggagcagtatttaaaaaaaaaattgggccaggtgcggtggctcatgcctgtaatccc[131 bp omitted]aaaaaaaaaaaaaatttgtagagatggggtctttctgtgttgcccagactggtctcaaactcctgggctcaagtgatcctcccttctcagcctcccaaagtgctgggattacaggtgtgagccactgtgtctggccctgaatcatttattttattttgagccaggttctggctctgttgcccaggctggagtgcagtggcatgatcacggctcactgtagcctcaacctcccaggctcatgcgatcctcccaccttagcctcccaagtaactgggaccacaggcacacaccaccgtgcccagctaatttttattttttattttttattttttttgagatggagtttcgctcttgttgcccaggctggagtgcaattgtgcgatctcggcccactgcaacctccgccttccaggttcaagtgattctcctgcctcagcctctggagtagctgggattacaggcatgcaccaccacgcccgcctaattttgtatttttagtagagacggggtttctccatg[132 bp omitted]taggtagcccagggtcttcacctcctggattcaagtgatcctcctgcttcagtctcctgaagtgttgggattacatgtaacagtcacttcattcaccctgaatcatttatgtaggggacaaaaatcaccgtctctccaaggacagaacttcttttttgttttgttttgttttgttttgttgagatggagtcttgttctgtcacccaggctggagtgcagtggcgcgatctctgctcactgcaacttctgcctcccgggttccagccattctcctgcctcagcctccccagtagctgggattacaggcgcgcaccaccatgcccagctaagttttgtatttttagtagagaaggagtttcactggccgagcgtggtggctcacacctgtaatcccagctactagggaggctgaggcaggagaattgcttgaacctggtagacggaggttgcagtgagccgagatcgcgccattgcactccagcctgggcaacaagagcgaaactccgtccaccccagccaaaaaaagaagtggttttgcca[139 bp omitted]cccaaagtgctgggattataggcgtgagccacggcgcctggccgcaaaaatggaacttctgcatcacaggtgactaacggtgccaggcacacagtaggtgttcaataaatcactttggactaaaagaacacagaggccaaggggaagtgaagaaacgactcacaggtcagttttattgggtgcctagtgcaggggtcagtacactacggccctcggatcagctctggccctctgcctgtttttgtaaataaagttttattgggtgcctagtgcaggggtcagtacactacggccctgggataagctctggcccactgcctgtttttgtaaataaagttttatgggcacagagccatgcccatggttttacatattgtctctggctactttcactctgcgatggcagagcagagtcattgccgcagagactgtggcctgcaatgctgaaaatatttactctctggccctttacagaaaaagtttgccaaaccctgagctagtgtgtgctgggccctgtgccaagccctttgtgtgtgctcactcagttaaccctcccacagccttaagggtgggggcaggggggtgggggggaataaggctccgagaggttgagaaacagacccagggtcacacagcttggagatgggtgagctgggaatcagacagacccgggacccctgatattctttaggatcttagctttgttaacctttgctaatttatcttattgtcttaaatgctaaaatgaatacacattcattgtaaaaagggaggaataaagaaaaggtgttgacggccttcttcagcctggggtacatcctgccgtatctttctccacagctcatccggggctactttcctttaaatctacagccattcagcaaacatcggcagaggagaaccgttttataagaaaactaagaagtttggaagaatctttccttcctgcccaccctggacccccatgagtaggtgtgctggggctggtctgcagtgttctcacgggaaaccaggaagctgggcccaaggcctacatgttggggaagacaggtcctgcctgtctcctgctgtggctccccagtgctctgaggacaaagcctgagctctccctgattctccaccgtccctctcactcactctggtcgtctggtcgctgggcctttagtgagtgtgccatgggggccctggggccgattaaattccagccccggggaccaggctcagctcccagccagggcacagacagatcagcacctgcggttgtctccaccccaacccccggcctttgcaggcacagcgccctccaccagatactccggcaaaggaggcctggggaccctgcgagcggggccgggggtgcagggagctgtcagctcctcgcagcggcctccccaggacccccctatcccctcgctcgccctgaaatgtgtgtccctctcggcgtctgggctctcgagaaaggcctttgcttgtctgacttcgcgagggtcccggctctggcccaggagctggggaggggcgggacttggtgacagccgggtcccagcaccgcgcccagacctaggcccttctcaggggtgccccggggcggggcgcgcggggcggggggcggcggcggcgcagccggcaggaggcgcagcgcccgctcgcagcgcggggaggtgggaggggagcggggcggggagcggggcgggcgggagggagaggggagcgcgccggagacgcgcgcgcccagcccaccccccgcgcccgccgccgcccggacaataaacagcagctttgcgcggggcgatgcccgagccggtgccgccgcccccgcgccgcgcagccccggccgccaggccttagcccgccccggcccccgccaggccgcgtccccctcccctcccctcccccgcgcgccacccgcgcccgcccccgcccggcaccgcggacccacccggacctcggcggggagatggagtgagtaggcgcgctcgggccgcggggctgggggcccggagctccgggagccggggaggggggaggccccctctctcgcgccccattgggggcgtcgctgcccccgcgaggagcaggaggcggcgcggggctgctggggccgcagcgcagccgggaagagactcgggctgggccgcgcctgccgggaggcctccccgctcccggaccccggctgcccacccaccggcgcgtggggacccgggcagcggcggctcgggccagtccaggacgcggggagggggaggctcgcgtctccgcccgcgccccgcccgcgtctccagggcgagcctcggctctcggccacctgtgggtggccccggggagatggagcgacccctccccagattgcaccggtccggcctcgcgctcacgcacccttcccccgccccagtctgagcgcacggctcctggcgccctggacgcgcgcgcgggccggtgccccccacccccgcccttcccaagggcctccaggggtgtcctgagccccccgccactgcgcaggtcccgagttaccgctggagggagaggggctgccctcggcttcccgggtctctggggtgtgtgagaagggagaggaaccggcgttttccagcggggcgcctgggtgggataccctctcggggaagtgtctcggagctggggctccactggtgtagctacaggagtgggctggccctgggctgggatccctggacccccgcatggctgcgcctgtgtgtgtggggggggggtggccagtggaggcaccgagcgagggcgcgtggtcatttcggacaccggtcccctcctcccggtgctcgggtgcccctctgcccctcactcccacaggtgggcactgcacgggcaggggtcaggaggctcctcctggggtcacccacctgcccacttcaggacaggggagccagctgccctgctgaggcccgggtccccaccccagcccgaggaccgaagaccggatctggaggccgcctgtggccccctgcccttcccactgggcgtgttttctaagccgccaactttccccggggattcacccgtgacccgccacgcccgcggctgggtgggggccgctgcctccctccctccctgggaaagcgagacacccagtgtcctctgcttttgaaaacccagacaaaggcctgacccctctccccgtcaccccgccccgggagctcagccaggggctcaggggagccagggcccagacttgcctgctccacacccccaccccccagccttgtttatctgccctgctcgccaggccccggaggagcctctgggcctctgacagccaggcctgggcagggtgtggctgtggggagggggctgcctaggaggacgacggagatctccctcccagaggaggggtgtcagcgaacactccgggtcgggcccattgtttccttcctgccaccccttcctttcccacgggggatactgaggcccagagaggagctgctgccccccccccaccccccctccatcacacagcacctggggccggggggcctcggtgcctcctgctctgctccacggtttctccgtcctgggtcagagggtggcccacaggtcccccattgggtcatcattgcttttggggatgcagacatgggacaggcacccagtgttaaccggctgctgtgagccgccattcgaggacgactctctccccggttcccgggctgacaatgggtggggacaggcccatctggtgccgcccggccttggacacctgccccctcgttcttctccccggcgggcttcaggcacgaaggccccgtccgctagaacgtgatcgcttgcctcctcccgtttccacagattttccagtcgaagacacgggagctggctgtggtttgtggtggtgcccgtctcgctggaaagtttcacaaatgaatttaagaatttaaagaattttaaatgtcattcaagaacaggttattttttgttaatgtgaggatttaaggagaactagcgggttgctaaccacagggccgatgctgccaaggtgaggagaacgtccaggaaggagctggggagaatctctgcttcggagagaatctctgtgctctgggagggtttgtgtggcccctgcgtgacacatggtctggctggtaaaataaagatattttggcctggagcagccattctccagcacccacagccctgtcctgggtacaggcaaggctcaaacccccgggatagggaggagaacagacttgggcctggacagatggtcaagaccggcccagactcctccctgctcgcagacctggaaattttcaataggaaagtctccgttgggtgctaactgggtccttaacgctccttcacacttgctaatccccctttttaatgagaggcagagcctgttaaaaggcaacagtacctagtgataattgaatttaataacaagcttttacttccgttgtatctgtttcttcctccatgtttccgctgtcttgtttgtggcggtggcttctggtttgcccagtgttgatcacaatataatgtttctttctaaaacaaggcgatttgatttacactggagtggttttgaaggcaaggaatagacagatactgtccaggaggtggcggaacatgggaaggtggtttctttcttttttccatgttgcccaggccagtctcgaactcctgggctcaagcgacttccctgcctcagcctcccaagtagctgggacgacagcattgcatgggaaggtggtttgagaagtgcaggcgtaatttattcactcggcaaccattaagtgggtacctgccttttccacggccctgttttgagtgctctgtatgtgtgtgaattcctctgatgcttttttttttcttttggagacagagtatctctctgttgtccacactggagtgcagtgctgcgatctccactcactgcaacctccgcctcccgggttcaagcaattctcctacctcagcctcctgagtagctatgactacaggtgcccgccaccacgcccggctaatttttgtatttttagtagcgacagggtttcaccaggttgcccaggctggtcttgaactcctgacctcaggtgatccgcctgcctcggcctccccaaagtgttgggatgaaaggcgtgagccacgtgcctggctgacacttgccttttccatggccctgttccgaatgctttatgtgtgagaactcccttgacccttgatccttctttttttttttgagacagagtcttgctccatcacccaggcagtgcagtggtgtgatcccggctcactgcaacctctgcctcctgggttcaagcggttctcctgcctcagcctcccgagtagctgggactgcaggcgcccaccatcacgcccggctaattttttgtgtttttggtagagacagggtttcacagtgttagccaggatggtctcaatctcctgaccttgtgatccacctgccttggcctcccaaagtgctgggattacaggtgtgagccgccatgcctggtttttttttattggagacagagtctctctctgtcacccagactggagtgcagtggcgcgatctcggctcactgcaacctctgcctcctgggttcaagcgattctcctgcctcagcctcccgagtagctgggattacaggtgcctgccaccacgcccagctaatttttgtatttttagtagagacaaggtttcgccatgttgggcaggctggtctcaaactcctgacctcaggtgatccgcccagctgggcctcccaaaatgctggcattacaggtgtgaggcaccgtgcacggcccactcccttgatccttacagaagccctgcgagagagggaaactgaggtacagggtggtccagtggcacatgtaaggacacacagctgcagaggcatgggtggggggtttgctgctgggtgggccgagcatgctctctctaagccgccggggacaggggagggtttttggtacctgtgtctgggggttgtggtcttgtggggcgtggtggtctggatatcagacatcctggtgtcggctttcaatcctggtgtgtttattgagaaacacagacggtggccttgtcggtggtcttggctcctggggcatctgccctgcctctgtgcccatccacgccgttctgtgatttgggagaggagtgtggagagggggtcctgactccccgtcacaccttagcatgtcagtctcctccgggcctcactgttctcatctggcgagtggggatgtgactgccatcattaggggagataggggtagaggaagggcaggtgctttatgggcctggaccctctgagcaccacccagtgggggcatctctgcctctgcccattagccaggttcatccttaagggcctcagattttgaccctaggaaattggcttatgttctttttgtttgtttgtttgagacacagtctcgctgtcacccaggctggagcacagcggtgtgatctcggcttatagcaacctctgcctcctgggttcacgcgattctcatgcctcagcctcccaagccgctgggactacaggcatgcgccactgcgcctggctaattttttgtatatttttagtagagacggggtttcaccatgttggccaggctggtctcgaactcctggcctcaagtgatccgcctgcctcagcttcccaaagtgctgggattaca[135 bp omitted]tcctgggttcaagccattcccctgtctcagcctcccgagtagctgggactacaggtacccgccaccacacccagctaatttttttgtattttcagtagagatgcggttt[144 bp omitted]ccaggctggtcttgaacttctggcctaaagtgatccgcccacctcggcttcccaaagtgctgggattacacgcatgagccaccgcgcccagcctacgttctttttttctttcttttttttttttttttttcagatggagtctctctctgtcgcccaggctggagtgcagtggcgagatctcggctcactgcaagctctgcctcccaggttcatgccattctcctgcctcagcctcccgagtagctgggactacaggcgcccgccaccacg[183 bp omitted]agtgcagaggtgtgatcatagctcactgcagcctccacgccccgggctcacgggatcctccacccagcctcttgagtagctgggactacaggtgccaccaccacaccctgctaattattatgttttgttttgtttttgtagagacggggtctccctgtgttgcccaggccggtctcaaactcctgggctcaagcatcctcccacctcagcctcccaaagcgctgggagtacacacatgtgagccactgcacccagcctgatgttctttaaaagcatcatatgggccgggtgcagtggcttatgcctgtaatcccagttctttggaaggccgaggcaggaggatcacctcaggtcaggagttcgagaccagcctggccaacatagtgaaaccccatctctactaaaaatacaaaaattagccgggcgggcgtggtggcgggtgcctataatcccagctactcgggaggctgaggcaggagaatcgcttgaacctgggaggcggagctttcagtgagccgagattgcaccactgcactccagcctgggtgacagacagagcgagactccgtctcaaaaaaaaaaagcattatatcacctttttctgagtgtgggcccctgtttcctctcatcctttcttgatctaggaaacctgtcatttgtttattgaacaaataaatgctccctcctcaccatcctcgtgctgtgcgggatcagcagggtctggaaagctatgcagcatcttctctgaggtgtgagaaaggcttcctcatccagtccatcatgaaccttttctgagaaggatgtttcagggttcatccaggcaggcagaaggatgcaccttgtggaaggactggcatgtgcaaagggctagaggtgggaaagcattggaagaagagaatgctctttggtgtttgttcctgctaggccttgagtgccaggatggggagtcatggatagtgtgtgagcaggggaggagcagtggctgacctggtcatcaaaaaaggcgctggcagctgaggagtgagcccagggaggagcaagtcatggccaagccttgattgtggctgcaggggcagcatgcagagaaatggcagagccagagggggcaggaccccacgtctaggagggcaaacacaggattccagaactgcgtgtggtcagtgatgcccacagggacggggctccctggctggggagaagtagcctggtccctggatacatgagggggtggagggcgtcctctaggaggatggctgcgtggacgtcttggtgtctgaggagtgtaaaatcaggccagagtggctgtctcccgccccagggtttcaagcagaaattcagggacagtcagagccagtcaccaggacagagcctggactgggtgggaagaggg[146 bp omitted]acccccgtctctaccaaaaatacaaaaattagccaggcatggtggcaggtgcctgtaatcccagctactcgggaggctgaggcaggagaatcgcttgaacccaggaggaggttgcagtgagccgagattgcgccactgccctccagcctgggtgacagagcgagactctttctctcaaaaaaaaaaaaaaagaaagtttagattaggaccagagtgaggccagctgagtgggaggcgctgcatggtcaacagactggtggtgggacagggccaggcctgggagcccctcctgggtgggcagaggctgtgggcaatggaggcagagatgcgggaccctgaaggccggggagggacagaggcccagggttcttcagtaacccctgtcagggagcgagaagctgatgtcctcatcagtttgtattcaaacgcttccagccatggaaagtctcagggcagggccagcaggggtttcagcactccatgggggttgggaaggaccccagcccctggcctggctcttgttgagaaggctggcattcccattacacatgcacgtatacacacacgtacacaggtatgtatacacacgtctgtatgtatatcattcttaacagcttcattaaaatacatttcacacgctacacagtctggctgcttaaagtgtacagctcaggcgtttttagtacactgacagggtgtactttttttttttttgagacagagtctctctgtcacataggctggagtgcagtgacgtaatcccggctcactgcaacctccgcctcccgggttcaagtggttctcctgcctcagcctcctgagcagcggagattacaggcacgtgccaccacgcccggctaatttttgtgtttttagtagagacggggtttcaccatattgaccaggatggtctcaatctcttgaccttgtgatccacctgccttggcctcccaaagtgctgggattacaggtgtgagccaccgcgcccagcagagttgtgtatctttcaccacaattgtagaacattttcatcacccccaaaacaagccctgtccccattaggcatcccctcccgtccccctccccccagccctcggggagccagtccccttcctgtctctggatcggcaggtcctggacatttcgtagacatgggatcacacgctgcgtggccttctgtgtctggcgtctctcactgagcgtgatgtcctcaaggtgcatccgcgccgtggcctgggtcagagcctcgctcctgttcacggctgagtcatgtcccagtgcgtggacggccacattgcgtttacccacacatctgtggatggacacccgggttggtttatctgtgaatctgtagttaccccccgagatggttggagcttgtgctctgttcacactgaggagtccgggtcctactttacataagtgtaagtcgtgacagtgagtttctttaaaaagaagaggcagtgatcagatgacaggtggccctgggagtggcgggagtgtgagaagagggggccgggattggggggacctctgggtgggggcttcctctgaagatggaaagaccctaatcgactccctggggcagcaagcatttattgagcacctgctgtatgcctggtgccaggga[131 bp omitted]catggtgaaaccccgtctctactaaaaatacgaaaattagccgggcgtggtggcatgtgcctgtaatcccagctactcaggaggctgaggcaggagaatcacttgaacccaggaggcggaggttgcagcgagccgagatcgcgccaccgcactccagcctgggcaacagagggagactccatctcaaaaaaaaagaaaagaaaaagataagtaaagtgatccgggtggtgacagctgcaggggtgcctggggctgaaaattaggacagaagaggcctaaatgaggaggtgacgtctgcagaaaggccttgggcctgaggcccggggaggtctgggtgaccgtgcaccaggcagcaatgcagccagcacaatggccctgcagtgggagctctgtgggacgtctcaggagtgtggctggagtgcagtcgcgtggggagggaccatggggcctctgcagcagggtttgccctgagaccctgctgaaagccagggaaggccccgttcacgcctcactgccccgtcttcccctgagggcccgggcagggtcccttcccaccccaggttaataggcaacaggtttgcttctctgcatctgtggcctgctttgacctccgtcttctcctctcccccggggtgatgcctctctgccgtaacccgtttagggttctcggtgccccagagactgggatggccctgggggcctccgtgctgcatcctgggagggctgggaggaggttccttcctggaaggctgcctggaggaggtggctgtgcttgagctgatcttggcggtggagaagggaaaggggaagctgggagctgatgaagggtgaggggctgacattggggcttggactccggggcttggagcagggcagggcggtggaggaagcagggccgggggtgccagcgctcaggggagacacaggctctgaggaccgaggatcaccgggactgggaagcagctggggtccagactccccgaactccatcccctgctgcccccgcaccccacacctcgcagccccgcgtgactcccccaccccccacaatggccaaggtcaccgtcagctctttcctttcaattagcagcaggaatgttcccggcgctgggctcggcgcctgcccgggcagggaccccctcgttctggctggagctgcccgggcgtgggttctggaaggacgagtgcgacgcccccatcccacacacgcccctcccgcctcggacagggcccgccctgctcgctgggtgaccttggccgttgcgtaacctctctgggcccttccaacaccaacgccccgcaccgcggaggcctctgcggggctcccgtcgggtttgggcctcatgaactcatctcctggagcaggactatctcacgcgctccagacgacgccctcgccgggccccgagccgcccacaccgccacacgccgtaaaaagcatcgcggggacgggaggcctgtgcgcgccggggtgggcgtcgggcggggggcgtggcgctccaggggctctgcgcggctgccgggagccagggaggctcggagacccagcacctgccccgggacccccagcacctgccctgggacccccagcagcaccaggaccgccgccgccctgagcttttccacgcctttgcccgggactcagctcctccgcccagcatgtaagaccttttgtgatccgacctccgcttccttccgtgacccctgcgccggggtcctggtcccagcctcgccgatcacacgggaatgagactcccccgcgcctggcgggccccgcccgcaggaggatgaacgccgggagaaggccgccctgcccggcctcagtttccccgtcggtgaaatggggctgacccggccgcaggagggagcgagcgctgggggaggcgttctcggtttgtggccgttttgatccgtgcgtcgtggtcatatttcgcttaatttttccaatctgtgacgtggagcgttctgtcggcctgaccttggctacccggcgtcgggggcgggtccacacccctcccggatggaagccccttcctgggcgggcgccccccggacgcccagacggggacccccctcccctcccccagccgcagcgcgggggagaaattcccgacccctcccgcccgtctaggccgccccaggcccgaagcctcggccccccccaatccccccaagcacaggccgggggcgggagatgctgcgccggccccacccccgcgcgccgggcctcggcgttgccatggggacggcgcggttgccacggcgaccgcctcccgcgggcccctccatccatcaccggggcggcggcgcccgggtctggggaggggcgaggggggcgcatcctgcgtgtcctggggaaaggcgagggggcgtccaggcccggggaggggcgaggggggcgccgggtctggggaggggcgaggggggcgccgggtctggggaggggcaaggggggcgcatcctgcgtgtcctggggaaaggcgagggggcgcccgggcctggggagaggtgaggggggcgccgggtctggggaggggcgagaggggcgcccgggcctggggagagtgaagggggcgccgggtctggggaggggcgaggggggcgccgggtctggggaggggcgaggggggcgcccgtgactgcgggggccaggggggcgcgtcctggggaggggcctgcgccctggggctgcttcccgcgcgttccctgcccgcccgcctgacattcccccgccctggccggccgggcagggacaggctgccccagacactaccgccttgtctccagcctgggaggcggccacacagccacactctgtccccgggtccggtctgagcggccacctgcctgccgggtggggacctgggcagtcggcgaccagcctgatcctggggcccaggagttccgccgttttgtggacctcccgccccagctctgctccctccggggtggccccgagcccacttagagctggaaaccaggactgtggggtggcccggggctgggcggttgttgttccaatctggctgtgcccagggccacgctgtgccctccctggacgtggcttccagccatgggaagaaggtgccgggcagggggaaccgtgtgtgagaggccctggggtaggaggcttggtgcatagccagggggccctgcaggagtagaccaacgggggaagtgaaggggccgacctgagggttcctctaagggctgatgggagccagggagcctctagagctggagagggacagggtctgattaattattattattattattgttattttgagatagggtttcactctgtcccccaggctagagtgcggtggcacgatctcggctcactgcaacctccacctcccgggttcaagtgatcctcctgcctcagcctcccgagtagctgggattacaggcgcctggcaccacccccagctaatttttgtatttttagtagagactgggttttgccttgttggccaggatggtctcaaactcctaacctcaagtgacctgcccaccttggcctcccgaagtgctaggattacaggcatgagccaccgtgcctggccttctttttttaattttaaaaaaattttttgtttgtttgttttgttttttgagacagagtttctctcttgttgcccaggctggagtgcaatggtatgatctcggctcaccgtgacttctgcctcccaggttcaagtgattctcctgcctcagcctcctgagtagctgggattacaggcatgtgccaccatgcccggctaatttttgtatttttagtagagatggggtttctccatgttagtcaggctggtctcaaactcctgacctcaggtgatccacccgccttggcctcccaaagtgctgggattccaggcgtgagccactgcacc[139 bp omitted]cctcagcctcccgagtagctgggactacaggcacccgccac[183 bp omitted]cctaggctggagacagtggcacaatcacggctcgacccagcctcaacctcctggattcaagtgatcctcccacctcagcctcccaagtagctgggaccacagggacataccaccacacctggctttttatttatttagttagttagttatttttgtagagacaggctcttgctatgttgcccaggctggtctcgaactcctgggctcaagcgatccactggccttcacctcccaaaatgctggaattacaggcttgagccaccacacctggcctagggtctgattctctttttgagaagctgcctctggctggcgggtggagagggagctgtgagggggcagggagttggcagggaacactagaggcctgggctagggtggggaacttggggtaggcaggaagcgagggcccgggcctcaagggaacgcacagtggatggttcactgcctgcatcacccgttgctggggctgaccgagaactccagctgagctggctattcaggaagggcccccaagccagaaagctggatcaagcctttcctgaaccccacccggtgaaggcagctgaacccagcctccctgaggagggagaagggaaagccacagagggcgcagctggtgttcccgggcccctgggaggcaccgggaagggtaggtgtcacctgccaggaagggaggagccggtggggtcacctctggggcatgggagctggacaacttcacaggcctcagcagggccaggaaaccaaacccgagtggggtgggcaggcggggcgcctcgggctccagggaggtcttgacccggagcagcctcccaggcggggctgggggtgagccagtgcactgtgcagtttcattttctctgctgaactgggggaggggatgggggcacaagggggacgtcataggaggccttagagctgcaggcatctgtgcctccgtgtttgcgtggatggggaaactgaggcccagagaggcacgagggctctttggaggcagggctggctctgggccctgacaccaggctgagagggctgggggtggcagcagacacgaagggcaggctgtaatttcagtctctgggaagataagatgttgggggtcgggggaacctgtctcccacccctcacccctggttcccgccaggccctgcccgtcagcctgggcctccccctgttgatgccgcccagagcttgggacacccaccgccaacccctaccgtcctctccctgcctcgctgcaacagccttggaagcctgagggtcgctgggaaggtcaaggccaagctcagccccagtctagggctcggtgctccttgcgtttttctttttgttgttttgttttgttttgtttttgacggagtctcgctttgttgccctggctggagtgcagcgcgtgatctctgctcactgcaacctccgcctcctgggttcaatcaattctcctgcctcagctcctcaagtagctggttttacaggtgcctgccatcacgctcggctaatttttgtattttttggtagagacggggttttaccgtctctgttggccaggctggtctcgaacttccgacctcaggtaatccgctcgcatcggcctcccagagcgctgggattacaggcgtgagccaccgcgcccggcctgctttttgcattttactaagcacctactacgtgcagctttctgagggcccacagaccagggaggggaggggagggtttgggtggcaaagctcttcttctagcaggtgggaggggaagcgagaaagcagtggggtgggggtgccctgaactccgtgtgaaccacggggctgcagacagatgaggagaggggctctgcaccagcttctggagctgcagggcgaggttgctgtggggaggtcagagaaccacagaattcctcggttctttcctgggcgagtgagcgtgtggtgggtgcctggtgggggtggcgagggcttcggtttctggacctccttcccacaccacaaagggccctgtatctttgaagcctgaagcccggtcccttcaggcgtatccggcaacagtggtattcattcattcatttattgtttgtttgtttgtttgaggtggagtcttgctctgttgcccaggctggagtgcagtggcgcgatctcggctcatgcaacctctgcctcctgggttcaagccattctcctgtctcggcctccaagtagctgggattacaggtgccgaccaccacgcctggctaatttttgtatttttagtagagacgggggtttcaccatgttgggcaggctggtctagaactcctgacctcaggtgatcctcccacctcagcctcccaaagtgctgggattacaagcgtgagccactgcgcccggccattcattcatttttgagacagagcctcatgctgctgcccaggctggagtagggtggtggggtcatggctcactgccccctggacctcccaggctcaagcagtcctcccaccttagcctcccgagtagctgggactacaggcgcacaccaccacaccttgataatattttttatttttatttttggtagagatggggtcttactagattgcctaggctggtctcgaactcctgggctggagtaatcctcccacctcggcctcccaaagtgctaaaattacaggcgtgagcagctgtggttttgcttttgttttgttttgcgacagggtctcactctgttgcccacgctggagggcagtggcgcgatctcggctcactgcagcctcgacctcccgggttcaagtgattctcccacctcagccttctgagtagttgggagcaattctcgtgcctcagcctccacgcccagctaatttttgtatttcttggtggagacaaggttttgccatgttggccaggctggtctcgaactcctgacctcaagtgatccgcctgcctcagctgccccctgatatttgttaagcgcctaccacataccagccctgggaggtgaggc[140 bp omitted]atggtgaaacccctgtctctactaaaagatacaaaaattagccgggcgtggtggcaggcacctgtcatcccagctactcaggaagctgaggcaggagaatcgcttgaacccaggaggcggaggctgcagtgagctgagatcctgccactgcactccagcctgggagacagcaagactccatctgaaaaaacaaacaaaaccacaatgattggataagagcgagtctggggttgaatccggacttggatcctttgctgtgcgtccttgggaggctcgtctccctgtctgggcttttgcaagcccaggcttgggaggtggggctggtgggtctttcatcctctgtttgcccctcctggggctgcagagtaggtcttggtgggcaggagggtgcagagaggactgtcctgatctgtcttatggtctgggccaggaggtgatacacttccttcttcccgaaacacccttctctggcctttgatgcctggtgaactcctatgtatccttggtggccctgcctcaatgtccccttctccccaaacccttcctggtcgctaggcagagcctcgtcccctcctgtcctggcttccttggccgctgagggggcagggagggccccactttacagaaggggaaactggggttcagagatgaaatcccttgccctggttacccctaggggaagaggcagagctgggatttgaaccgcgtctgacggacagcagggctcagtgaaccagagcttgaccttatctccctcccgcagggtcctggcggcagagaccacgtcccagcaggagcggctgcaggccatcgcagtgagtttccgccgccccgcagacggtgtggtcagggtggggaagtggggggacctggggtctcgggccctggacctgtcctaggacctggaaccagggcatggtgggtggtgagttatttgcttgggaaacttggatcctgctgacccgcagagaatggaagtggagaccccctgagtcggcagctcctggacccccggcctcgctctgcctgatgggtcggtggggaaactgaggctggcattccctggaaccctgccctcgtcctgcaggaaaataaactttggtgatgggagcacagatgtgctttggtgccatcttggtggcctctggcccaagaaggccctcttggtgtccgcagacccctctctgtgacccgaccctcctgtgacgtggcccgattcctgggttcaagtgactctcctgcctcagcctctcgagtagctgggattatgagtgaccgccacgacgctgggctaattgttgtatttttagtagagatggggtttcaccat[139 bp omitted]ggctggagtacagtggtgcgatccgctgtcacctggaagccagtgggccacgaggatccccggacagaggaagcaggatcgggctgggcagagccttgtgtgggggtgggggggtctccgggacccccacgcccatccctgaccccacccggccctccccacaggagaagcggaagcggcaggcggagatcgagaacaagcgccggcagctggaggacgagcggaggcagctgcagcacctgaaggtacgagcggggcagggacccagggtcagggagtgcaggcggctgtgaggcggaggccccggactcctgcccaaccctgaccctgaccccaatcccaacctgaccctgaccctgcctccagccctgaccctgaccccgaccctgaccccgaccccgaccccgaccctgaccccaacctgaccccgaccctgaccccaacctgaccctgaccccgaccctgaccctgatctcagtcctgactctgaccctgacctgaccccaacctcaatcctgaccctgaccttgactctgacccagaccctgacccccaacctcgattgtgattctgacctcagcactgatcccaaccataaccctgaccccaaccttggtcctgcctcaaccccgaccctgatcctgaccctgacctcagtcttaagtcttaaccctggccctggtcctgcccacgactctgacctggatccctgctgctcagtccaaggcactgcgggagcgctggctgctggaggggacgccgtcctcggcctcagagggggatgaggacctgaggaggcagatgcaggacgacgagcagaagacacggctgctggaggactcggtgtccaggtgggggctgcagcgtgggtgccaccgggctgggtggggcctcgggggccgctggctcccgggagggtgtgggctgggaagagtcgtcagtgtgctttgagggagatgcgtggaccgggcaggccaggacccaacatgctttgagggggacgcaggacgggacagatcaggttggggcatccacctgggtctggggcagcttgctgggggcagaggctggctgcgtggcctcaggcagggagatacccctttcccttcccaccgccctcgtttgagccagcgagggacgtggcgtcgagctcctgggtccctggagctggccagcgggggacgtgacgtcgagctcgtgggtccctggagctgggtgttgccggcattggcctccctgggggcttcctggcgccagcccagctggcgggcaagcgctcccatggttcgaacgggatggatgcagagcagctgggcccgcaggaagctcgggcgggggcaggaaggggacaggatggggaaagtggcaatccctgtgggggctgggaccaaaggcctggagtttccggcgggcgggaggcccaggctgtgctcgggggcagcagggtcagggtggagggaagtgacgaccaagattccaaacgtctgccctggccagggaaggtgcccagaggcgggaggccggccggatcacacggacctcgcaggcccttcccagacgctgggttctgaccccgtgggggcccctccctgcccagttctgcccatttgctttgaagaaagcacgttgggggtgttcgggatggacttccctcctgggcagggcgtgtaaaggcatggacaggccgggtgcggtggttcacacccctgatcccagcactttgggaagccgaggcaggaggatcacttgagatcagaggttcgagaccaacctgaccaacatcgtgaaaccccatctttactaaaaatacaaaaattagcctggtgtggtggtgcccagcctgtaatcccagctactccggaggctgaggcagaagaaggccaggcg[208 bp omitted]gcttgcagtgagccaagatctcaccgctgcactctggcctgggcaacagagtgagactgggtctcaaaaaataaataaataaataaaaataaaggcatggacatgctgggcgtgggtggggctcacacctgtaatgccagcactttgggaggccgaggcaggaggatcacctgaggtcagagatttgagaccagcctggccaagatggcgaaacccagtctctactaaaaatgcaaaaattaggtggattagtggcgggcgcctgtaatcccagctactggggaggctgaggcaggagaattgcttgaacccaggaggcggaggtttcagtgagccgagatcaagccactgcactccagcctgggggacagagcgagaatctgtctaaaaaaggaaggtatggacagggtggggcagttctggtgggtttggggccttggaatgagccgagtgttacccactccctgggcctcagtttcctcacctgtgaaccagggaggc[131 bp omitted]ttctcctgcctcagccttctgagtagctgggattacaggtgcccgccacgcctggctaattttgcatttttagtagagacggggtttcaccatgttggttaggctggtctcgaactcccaacctcagctgatccgcccgcctctgccttccaaagtgctgggattacaggtgtgagccactgcgcctggccccactgtgcatcttaattccagcaaacattaagcaccagctgtgtccctgggctggacgggatgttcagaccgaggtggggctgagacgggcctggccctgtctgcagagaggtggatggtcagacacctgggcgaaggcagtgggagttactggccgtgggggctgggcacactggtgttcttttcacgcggccctagtgggcacaggctcaggcccctcgatggagggtgaagacctggcttgaggcctagtttgctttcagaggcttcagcttcacccctccccagggcagcctgcttctcaggtgctgaaactgagctgctctgggtctccactacccaccttctgcctgctcaggggctctgcccaggcacctcctgcaggaagccctccaggctgactgtgggctcccagacacctcctgcaggaagccctccaggcggctgtgggctggacccctcttctggttggaggggacacaagtctggctctgtgtccaacctgtcagcctgggcccaccttgttagacttacgcactcagccctcgtctgtcctgtcctcaggctgaggctgagctgccgtgaatgtcgcccgcccttgccagaccccggggctgggatttcatatcccggttttgttttcctggatctgcttgtcccgttatctcttctaatacttggaaagtgacatggtttttccagtttccctggtgagataaagtttcctgttaaaatgtgcaaatttgagcgggaaaggagagttcatttgatacagacagtgacataaacagcgcaggccaggggtcaggggacacagggagtcagccctggtttggatcccgcctctgctacctgctggccatgtggcttttgcactccgtgcctcagtttcccccatcatgaaagagcacgatgcctcttggggctgcctgggagccttaaattcagagagctaggccgagtgcggtgggtcacgcctggaatcccagcactttgggaggatgaggcgggcagatcacctgaggtcgggagttcaagaccagcctggccaacatggtgaaaccctgtctctgctaaaaatacaaaaaattagctgggtgtggtggtgcacgcctgtaatcccagctactcgagaccctgaggcaggaggatcacttgaacccgggaggtggaggttgcagcgagccaagatcacgccattgcactccagcctgggcaacaagagcgagaatctgtctcaaaaaaaagacactggggagctgtcgtacagaaggtgcccagagccccaccggggatgcaggagtcaccctcacaggcacaccctctccccaggttggagaaggaaattgaggtgctggagcgtggagactccgccccagccactgccaaggagaacgcggcggccccgagcccagtccgggccccagccccgagtccagccaaggaggagcgcaagacagaggtggtgatgaattcacagcaggtaagggggtgactggggggagcggatccccaggcacccactcccgctggccccagagcgaggccccagcccttccatgtcagcgtagctgaggggacaggcacagactagagccaggcacttgatttccagctcaccggagccacttcccagctgtgtgagccgggacacgtggtttcgccttgctgggcctcggtttccccatctgtaagatgggggagtaatcagagcagccaccgctgggggcatcagaaggactcagggaagcaggagacccacctgggggcatcagaagggctcagggaagcaggagacccacctgggggcatcagaagggctcagggaagcaggagacccgcctgggggcgtcagaagggctcagggagcagcaggagacccggtgctggtgggtgtggtcatagtgtttttttgcttttgttgttttttgagactcgttctgttgcccaggctggagtgtagtggtacagtctgcaacctccacctcccaggttcaagcaattctcctgcctcagcctcccaagtagctgggactacaggcgcctgccaccatacccggctaatttttttgtatttttagtagagatgaggtttccccatgttggccaggctggtcccaaactcctgacctcaggtgatccacccaacctcggcctcccaaattgctgggattacacgcatgagtcaccttacttggcctggttattttgtttctgtgtttgtttttgacacagggtctcactctgtcacccaggccagccagagtgcagtggcacaatcacagctcactgcagcctcgacttccccagctccagcgatcctcctgcctccgcctcccgagtagctgggaccacaggcacgcaccaccacgcccggctaatttctgtatttttggtagaaacggggtctctgctgtccaggctggggttttcatggtttctatcgatcacctgcatctgtttcatgtggccaaggctcctgaaagcccttcctgtgggaacagtatccccgtgtgatggaagtaaaaatcgcagcccacagaggcagagaggctggctcaaggccacacagctgagtggtccttagtggagtcggctgttaattctggcatctgccatctaagccagacgatgttaaaaccagacccttggccgggcttagtggctcacgcctgtaatcgcagcactttgggaggccgaggcaggcacatcatttgaggtcaggagttcaagaccagcctgaccaacatgataaaaccccatatctactaaaaatacaaaaattaaccagatgtcgtggccggcacctgtaatctcagctgctcgggaggctgaggctgagaatcacttgtacccagggggcagaggttgcagtgagctgagatcacgccactacactccagcctgggagacagagcaagattctttctaaaaaaaaaaacctggttctgggcacagtcctggacctcactgagctcacgtcaggtgggaagatggcgtgtattggggaccacccagggagggtggtcaggccgaagaggtgggaagcccagggcgctgtggaatccccaaggaagtgcctcattcgtgggagggctgggcaggcgacctggaggatgtgggtttcgtgggagggctgggcaggcgacctggaggacgtggggtggtttttttgtgtttttttttttgagacagagtttcactcttgttacccaggctggagtgcaatggcacgatttcagcaacctctacctcctgggttcaagtgattctcctgccttagcctcctaagtatctgggattgcaggcgcccgccaccacgcccagctaattttgtatttttagtagagacagggt[131 bp omitted]taggagttctccaggtgcttttccctgaaggttgtttgagcatggactagtgctgtcatgggagactcagcaatacacatgcacggcccctgccttcctgacgggcacacccagtgacgtgatgagggaagagtgcactgagggagcatcagacaccacagccctgagacaggagtgtgtcccagaaacagcaagaagaccagggatgccagggcacagttcagggagaggggcctgtgtgcagggtctgaccatgcagggcagaacgggttcagacaggcgacactagaccctgagcctcgcacagtggctcccaggaggccaagggaggaggatcgcttgagagcaggagtggacgagactggagggggcacggaggagccggctggattcagggtggcctgcgggagccgctgatgcgggggtatgtggggagggagggaagaaatgagatggagcggacgtggtggctcagcctgtaatcccggcactttgggaggccgaggtgggtggatcacctgaggtcaggggatcgaaaccagcctggccaacatggagaaaccccgtctctactaaaaatacaaaattagccaggtgcgatgacgcaggcctgtaaccccagctactggggaggctgaggcacgagaatcgcttgaacccaggaggcggaagttgcagtgagccaagattgccccattgcactccggcctgggcgacaagagcgaaactccatctcaataaaaagaaaaaagaaagatgacctctgtgtttctggccagagtcccaagaggataggatgagaagcgggtgcgtatgacgtcacccactgtgccatgccctccccaggctcctgaccccatggctccccttcctcttcccggggatgctgacgcccctgacccttctctcttctttcttgcagacgccggtgggcacgcccaaaggtaggacctctggaaggaactcgtggggcctcggcgcactctggtggccagagaggggatggcagggcggggagtgaagctacaaagttgctcggtgcctcacgcctgtgatcccagcactttgggaggccgaggcgggtagatctcctgaggtcaggagttcgagaccagcctgaccaacatggcgaaactcagtgtctactgaaaaaatgcaaagacaattagccgggtgtggtggctcatgcctgtaatcccagcactttgggaggctgaggcaggaggatcgatcgcttgagcccaggagttcaagagcatgctgggcaacacagggagaccctgtctctgccaaacataaaaaaattagccgccggccaggcccagtggctcagacctgtaaccccagcgctctgggaggctgag[132 bp omitted]gtgggaggatcacttgagcccaggaggttgagctgtgatcgcaccactgcaccccagcctgggcgacagagcgagaccctgtctgtaaactgcatttcacggaacgtgtccgcttctgtatcgatagcgggacagccaccagccgggattgacgctggcgtctgaagtgcttctggcctggtttgttgtgtgttaattattcataaggagagtgtcttcttgtcttactgtagaattaaaaattaatcattaaaaaaatccagacaggcctctcagggattttgtgaaaatcactgggctgaggatgaggaatgaactgtgaggctgcctgtgggattttctaggggttgcggtgggggtccaggtgcctgtgtctgtgcggggcctgtgtctgggggcccaggtgcctgtgtcctggtgtctgggtggggtctgtgtgtctgggggcccaggtgcctgtgtcctggtgtctgggtggggtctgtgtgtctgggggcccaggtgcctgtgtttgggtgtctcggtggggtctgtgtgtctgggggcccaggtgcttgtctggatgtctgggggcccacaggtgcctgtgtccgggtgtctgggtgggatctgtgtgtctgagggcccaggtgcctgtctggatgtctgggggcccaggttcctgtgtccgggtgtctggatgggatccgtgtgtctgagggcccaggtgcctgtctggatgtctgggggcccaggtgcctgtgtccgggtgtctgggtgggatctgtgtgtctgagggcccaggtgcctgtctgggtgtctgggggcccaggttcctgtgtctgggtgtctgggtgggatccgtgtgtctgagggcccaggtgcctgtctgggtgtctgggggcccaggtgcctgtgtccgggtgtctgggtgggatccgtgtgtctgagggcccaggtgcctgtctgggtgtctgggggcccaggttcctgtgtctgggtgtctgggtgggatccgtgtgtctgagggcccaggtgcctgtctgggtgtctgggggcccaggtgcctgtgtccgggtgtctgggtgggatctgtgtgtctgagggcccaggtgcctgtctgggtgtctgggggcccaggttcctgtgtctgggtggggtctgggtgtcaaaggcccaggtgcatgtgggagtccggatgcacttctgtgaaggggcgttgggctgtctggggggtccatgtgacctctcctctgaccctcatctctctctccgcttccacctcccgtgcagacaagcgagtctccaacacgcccctgaggacggttgacggctcccccatgatgaaggcaggtgggttggcccccaggctctgggccccagatccagccgctgtcagggaccaagtctcggtccggggggccgggtggggcgggggcgacaccgacctgctctccgcagcgtctgacggggccgtggttatgggggtggcagctggaccgaggccgaggctccgagcctggggtgggggccccctctgctttgttgccctggtcccacgccggcccacgcttccccgagaagacgggccccacgcatggcggctctaaccgacgcgacctcacggctttcattccaccctaatctcacggctccctcctggggcccgctgggggtggcgctcacgcctgaacatgctcgctgcaaatcttacctgctccagtcctcgggcagtaggactggctgccccgggagaaagtgggtgccccgtccctggaggcaaccaagccaggtccccagcaccgctgcgcttccgagaagcaggggaaggtgggggttgacgctgagtgccacacggtgctcaagtcaggctcgaacccctggtctgccgccttgaatttctccgcctgccagaggggtgggacctcagtacgccatcctggggcccggcacaggacaggagcccaataatgagaaatcgtcgcagtgggcaaaaccactgctatgtgagtgagctggaacagcacagaaagaaggcagagggccgggcgtggtggctcacacctgtaacccaccccagcactttgggaggccgaggcgggcagatcgcctgaggtcaggagttcgaaaccagcctggccaacatggcgaaaccccatctctactaaaatacaaaaattagccgggcatggtggtgcacgcctgtaatcccagctactcgggacgctgaggcaggagaatcgcttgaacctgggaggcggagtttgtagtgagccaaggtcgtgccactgcactccagcctgggcgacaagagcaagactccgtctcagaaaaggcagcaaggcagggaggtgaagaaggactctggggtggctgcccaggacgggacagggctggaaggaaggagagccacccggaggcccaggtctccagcacggtccagggtgggggttgccccaggatgcagcagacagaggcatttgtcagagcaggtggtgcctgtgggcctctgtgccagtgagaccagccctggcagacaccgaggcccaggtcccccgctgatccccgtggccactgactttgtgcagtgcacaacctgctcaacagtgtgggcagctctggactagctgtctggggtggagggctgaggctgtgcagagctatagagttgaaaaacagtcgtcccttcacccagaatgcctttcaagcgcctgctgcatgccaggcattgggggagagggtattctaatgagggccacaacctctactacggtagaaaagtgaggccaaggacgttgagctggaggaaggagaatttgaaccagagggctcaggggaggggagcgttcaacgtaagaggtgacgtctgagcaaagacccagaggtgctgagggagcaaggcacgcagctatctggaggaaggtgtccaaggcacgcagctatctggggaaaggtgttccaggcagagggcacggccagtgcaaaggccccggggcaggactgcgcctggggtgttggaggaacggccaggagatccgtgtggctggagcagcgtgaggagggggagagggcggaggagagatgatggagagattgttgagggccctgtggcaggggcgggaggggacgtgggcttttcccgggagggaggcaggaaccatggggggctgcaggcaaagccgggactgccccgactccgtgctcacccacgccctctggtgactgcagggagaacagaccgtggacggtgccaggtggaggggacagggctgctgggggaggaggctgggatgggccgtggaggggcgagcagtgggcggttccttatgttctgaaggtggagcccccagggtttgaggagaaacgaggtgtcagggaggactggccaggcacggtggctcacgcctgtaatcccagcacctttggaggccaaggcgggcagatcatttgaggtcaggagttcaagaccagcctgagcaacatggtgaaa[131 bp omitted]aaaccctgtctctagtaaaaatacaaaaaattagctgggcatggtggcaggtgcctgtaatcccagctgctcgggagccttaggcaggagaatcggttgaacctgggaggcagagattgcagtgatctgagatcacgccactgcactccagcctgggcaacaagagcaaaactttgtctcaaaaaaaaaaagagggaggactgagctgcccccaacgggtgggaagagccagggtgggggcaggtgtagggggcagattgggagtagtgttatggacgtgtgagagtggggcccctgtggataggggctgagtccaggtcaaggtccaggtggggatgggtgtgcgggagattagagccgagtgcctgggcgaggtccccggcgcagagcagagtccagggccgcagccgggcctaagcgtcgaggttgggtgggaggagggaaacgaggtggctatgggggccgaggggccaggcgatggcagggctgcccacgatggggaccgatggcccctcagaagtggtgaggacatgcagctatctggggggtgtgccaggcattgggaacagcctgtgcaaaggccctgaggctgggccgcacctggggtgcagtgtcatgggtcaggccagtcctggcagccctgttcagctcccgctgcggggcggggtctcagggaggtgcctggtgatccccagtgctcgtcatcttcaagcaggcctgggggtggcgggcagccaccagtcgctgttaggatgcaggctctgtgtggtttctgcaggaatgatttttacagagtggggcgaggtgctggctgtggagttagggccctgatgagtagcaagttcgactatctcaggagggttccttcattctgagtctaaatagatgacggcgtgtccaaccgttggctggaaggaggcgtcaagtcctgggagcttggatggtcggggcgggggctgtgggtctgcagactgagccccagtctccgccgtgaccccgggcaaggcaggatctctctgggattcacctgctcctctgagaaaccaggaatggtggggctcgagggctcacgtttataatcccagggctttgggaggctgaggtgggaggattgcttgagcccaggagtttgagaccagcctgggcaacatagtgagacccccatttccaaaaaagataaataaattagccgggtgtggtggcgcacacctgtggtcccagctacttgggaggctgaggtgggagaatggggtgagccaggaaggtcatgactgcagtgagctgtgatcgtgccgctccactcca[140 bp omitted]atagagaaaccccgtctctactaaaaatacaaaaattagctgggcgtggtggcgggcgcctgtagtcccagctacgtggaaggctgaggcaggagaatcgctagaaccgggaggtgagtccagatcacaccactgtgctccagccggggcgacagagcaaggcggctccatctcaaaaaaattaaaaagatccgggaacaatgaaggctttccagatgggctgggctggaacctgagcttgacagacaatagtttggtggcgaaacagaggacacagtgcagagtacagggacgaggaccatctgggcggacagcaggatgggcctcaaatgccaaggagaggtgttcagactggtcgtctccaggcactggggagctatggagggatgtagagttggggagggccgcgtcgagaaggtgcccaggcatccccggctccgcctgccccatcgctgcttggctctgcgctgctggctcccccctccctggcttggccgcagcccggcgggggggtgcgggggcgggcaggccgtggtgtaaccccgtgactctcgtgccagccatgtactcggttgagatcactgtggagaaggacaaggtgacaggggagaccagggtgctgtccagcaccacgctgctccctcggcagccgctccctctgggcatcaaagtctacgaggacgagaccaaaggtacgagcaccccggcccctgccctccctccacctgggccagagccccgaacacgtgtgctcccagcgtgtgggtctggcgtctgccccggaatcaggaccccgattcgatgtgaagcagatgacgctgttcaggccagggcctcaccccctgtggcccacagctgggctcagaggtcgttcagccctgggctcactgcccaatcattcatccactccagaaagctgcctgaaagctgagccgggcaccaggtacccagctgggctctggagggaaatccggaggtagattcagcttctgtccttgccgggtggcaaaccgggcccttccatctggagctcctaaataattcgtttaaataattactgctagcccaagggctcacgcctttagtcccagcactttgggaggccgagggaggaggatcgcttgagcccagaagtttgagaccagcctgggcagcatagcaaggctccgtctctaccaaaaaaaaaaaaaaaaaaaaattaccctggcatggtggtgcgtgcctgtggtcccagctacttgggaggctgagatgggaggatcacttgggcccaggaggttgaggctgtagtgagccgtgatcgcaccactgcactccaacctgggcaacagagtgagaccctgtctcttaagaataaaaaataataataaagaattgctagcgtgacagaagccacagaaaatgcacatccagggggctgtgagaagtctcacagggtgaggatggggccgggggaggcttcccagaggaggcaagcaggggctcatcagagacacgcagtgcatgggaaccacacctggcagagccgcagcccctgcaaaggccctgaggtaggatggagtcagctgggctggagggctgaggggagttgggctgcaggagtgaggggagacgggctgcaggggtgaggggagacgggctgcaggggtgaggggagacgggctgcaggggtgaggggagacgggctgcaggggtgaggggagctgggctgcaggggtgaggggagacggggtgaggggagacgggctgcaggggtgaggggagacgggctgcaggggtgagggggaaccaggttggtcagggagttgaggagctgggctcacgcagggaggagaagggtgctttgcctggaggcagggggacaggcggggccgtgtcctgagggctttgggaagccttgggtgcgttgggtcctgacggtgctgaggtctaatttggttttaagggctcctcctagaggtcaagaggcaaacaggctgtgggagatgccagggaccccaggaggaggagggaagctccacactgaagccccactctctctctttctttttctttttatttatttactttctgaagaaagagtttcactctgtcgcccggcccgcagtgcagcgatgccatcacagctcactgcagcctccagctcctgggctcaggcgatcctcctgcctcggcctcccgaaatgctgagaccacaggcatgagtcactgcacccggcctctttttcttttatgagatataattcgcagaccataaaattccgccttaatgggaggctcatctgggcccgggacattgaggctgcaatgagctatgatggcacccctgcactccagcctgggccacagaccaagaccctgtctcaaaaacaagaaagaggagagaagccccatccccatcagctgtcacttcctgtcccctccccagtcagcgtcactccctatcccctccccagctctggcacccacgcatcccctcctgtctctctggattggcctgtcctggacatttca[131 bp omitted]tctgctaaaaatacaaaaattagctggacgtggtggcggacgcctgtaatcccagatactttggaggctgaagcaggagaatcacttgaacccaggaggcggaggttgcagtgagccgagatcgcgccactgctctccagcctgtgcgacaagagtgaaactctgtctcaaaaaaaaaaaaaagaaagaaaagagaataaatggggtcacacactgcacgtggccttctgtgtctggcgtctctcactgggcgtgacgtccccaaggtgcatcggcactgtggcctgggtcggagcctgactccttttcatggctgaatactattccacgggttgggtgggccatggtgggtttatcccttcttccatctgtagacagttgggctgtttctaccctttggctgcagtgagtagcatgctggggaatttgtgtgcaagtatttgttcacgcccctgctttcgaggcctttgggtgtacacgtaggagtgaactgctgggtcctgaggcgactgtgtggagctccgtgaggacctgctgttttccacggaggctgcaccgtcccgttcccacaggtcgtggatgagggcccagtttctccacgtcctcaccagcgctcgtagcccattctcgtggctgtcctggtggcgtgacgtggggtctccctgtggtttggattcccaaagccttctgttctcagaggcagcttggcctctgcggtgccccagatgctgtcagaggggtccccgcagcccagctctggagtggctttggggtgtggcgttggtggcatctcagctctagctctccccagctgtgtggccctgggaagtccccatgcctcgtcttccggatgaggtcctcacccccatcactccaccctcctcagcctcacctggtccctggggattccagacctgccaggctggacactggttgcttagcaacgggcaggtgatccgtttccatggcagccgagggctccaattcctgtcttggggcagcggccagtgggacacactgagttcagttccgcctgatccagacacaccccaccctctgggcctccagcccaaagtcattgagatgccttgaagcatggactcccctccctgggggcttagaaactgaaagtggagaacactttccttctggtctgtagccaggaacaggagccctgacccttggccgagaggaggcgagtccctgggaccccccttgcgtccctcccaactcccagcgtggcccaggcagccgtgtttctagaaggaatttgcagggctgtgagctagggctggtgttagatcatagcagggagccgtggggtgctgaaatccggtccttggagagtccaacacacctcaagaaatgtcaagtcagagacacacagataaggaaatttggaaagacttgagaaacacatttagcaagattgattatatgtataaaatgctacccagtggagaatacacattcttttcaaacacagaacattgtcagaaagtgaccaccgtggcccaggctgccaaggaggttttaggactgttaacagagtttgtatcttctgctctgtgttcctctcctccctgaaatttaaaaacaccctctaaataaattgtggcttcctgtggcaatcaatcaaact[137 bp omitted]aggtgaaaccccatctctactaaaaatacaaaaaattagccaggtgtggtggcaggcgcctgtaatcccagctagtcaggaggctgaggcag[136 bp omitted]aggacacagccaaagcagacctcagaggaaaatgcatagcctttagggaagctcctagaaaacaaaaataaatgaatgaaactttaactcaagttagaatgaatgaaaatttcaatttaagatcaatcaaatacacccatagatggaaaaaatcagaatccctgtaatggccaggcatggtggctcacacctgtaatcccagcactttgggaggccaaggcgggtggctcacctgaggtcaggagttcaagaccagcctggccaacgtggtgaaaccccatctctactaaaaatacaaaaatcagccgggcatggtggcgggtgcctgtaatcccagctactctggaggctgaggcaggagaattgcttgaacctaggaagtggaggttgcagtgagctgagactgcgccactgcactccaccctgggcgacagagggagtcaaaaaaaaaaagcagcaggcacggtggctcacgtgtgtaatcccagcaccttgggaggccaaagtgggtggatcacctaaggtctggagttcaagaccagactggccaacgtggtgaaaccccatctctactaaacgtacaaaaatcagcctggtgtggtggcaggtgcctgtaatcccagctactctagagactgaggcaggataattgcttgaacctggaaggtggaggttgcagtgaactgagatcgtgccattgcactccagcctgggcaacaagagcgaaactccatctcaaaaagtgaaagaatccctgtaacctccagttccccagggtgggtggtcctgtcttgtagaagagaaacaggccccgatgcggggaaggagcaggggtttggctctgtgaccttggcccagctgtgtcccttctttgaactttcatttttgctatctttacagcggaaatgaatccctacttttcagggtgatcacgtgggagctagttggctaaagaatatggaattacaggccaggtgcggtggctcacgcctgtcatcccagcactttgggaggctgaggtgggcagatgacttgaggtcaggagtttgagaccagcctggccaacatagtgaaaccccagctctattaaaaatacaaaaaattagccaagcatgttggtgcatgcctgtaatcccagctactcaggaggctgaggcaggagaattgcttgaactagggaggcggaggttgcggtgagccgagacagtaccactgcactccagcctgggcagctccatctcagaaaaaaaaaaaaaaaatcccaattcattcctttccactctttcttggttcctaataaatgtttttgtgcttataaattttcctcattgtcggctgggcctggtggctcacgcctgtgatcccagcactttaggaggccaagacgggcggatcacctgaggtcaggagttcgagaccagcctggccaacatggagaaaccccgtctctactaaaaatacaaaattagctgggcgtggtggcggattcctgtagtcccagctactcaggaggctgaggcaggagaatcgcttgaacccgggaggtggagcttgcagtgagctgagatcacgccattgcactccagcctgggcgacagagtgagactccgtctcaaaaaaaattttttttcctcattgtacggcattggctgcatccacagatgccaacagggggctttaattgtctgtcagttctgacggtgtaatctagttcgtgatttcctctttagcctggaggaggatacaagccttgccaaggtttccctcctgcctgagccaggtcactctctctgtccctcctgcctggagctgggtcattctctctgtctctccttgtacagtggtccatgctgtggacggcaccgccgagaacgggatccaccccctgagctcctccgaggtggacgaactcatccacaaagcggacgaggtcacgctgagcgaggcagggtccacggccggggcggcagagacccggggggctgtggagggggcagcccggaccacgccctcccggcgggagatcaccggtgtgcaggcacagccaggcgaggccacgtccggcccgccggggatccagcccggccaggagcccccggtcacaatgatcttcatgggttaccagaacgtggaggatgaggccgagaccaagaaggtgctgggccttcaagataccatcacggcggagctggtggtcatcgaagacgcggctgagcccaaggagcctgcaccacccaacggcagtgctgccgagcctcccacggaggccgcctccagggaagagaatcaggcggggcccgaggccaccaccagcgacccccaggacctcgacatgaagaagcaccgttgtaaatgctgctccatcatgtgagccggcccccgagaccccggcccccaccccacaccacagacacccaccagcccggcccctcccggcgcctgcccaccctccacccacagcctcacgggtccaggacttggcgtgttgttacatgttccttccgagttttctttcgctggaaagagggacaggggcccccacccgtcaccacgccccaacactccccccgaaccagagccgtgcacttgtgcctggtaggagagagacaggacagacccgcttttcccgagacaaggaccccccatgtcacggcagcttcacagacgcggctcgcgcccaccggggtcctggcgggtgggacccgcagcctccacgcggcccaggccagcctgccaccctctgggcctcctacctgtgcctttctctgaggggacaccccgccagagagggccccgggagccgggggtgggtactgaggcctgctcaggccctggaagtgaggctctatggggttccctggccaaggcgctggccccccaatctcaggcagttggggtgaggccgtgcctctttgggggctaaaggtcttgggtggaggacaggcccctctgctgtgcccctatgccctgtgtgggcccaaccagtggacaatggagtctgggggagggggaaccccggggacatgcccccacccgggaggggccggtaacccctgggctatcttctagacggggcgaaccaggggtcattgacctgccccctgcacagggcagggaccgagtgagccactccttgtcccgagctcccgcccccactgggccctccttcctcctggtgctaatttggggaccccaggggccgcccccggcctcttctccatcctgcttggaccagggtcctgggtcttcccaaccataccccgagatcaggccccacctgccagctctactgggcttggagcacgtccgggcagtggagggagggacacagcctgggacaggaagcctcttgggttggagcaggagaccctcatttgccacccagaccaatgtgagcctgcccccagccccctctcattggaagtggcaaggggcttccctcctgggggcagctacactcgtccccagaggcacattcgtgcacattctcacagacaccgtctcacacgttggctttggacaaccaggccccaacttggtccctgccctagggacctccagcctggtgcccagtgctcaggccacctcctggtccagtcaccacctgcagcctcggcagggcaggtacaggggccacctcggatgggagcctgggtccctgcctccgctctgcccctgggtggctgggaggagaggccctctcgggggtgacctgggcgtcagccgtggaaccccctcctcctccctggagtctgcctgagtccctcgagccgcgagccttcgctgaagtgcccttgctataaccccctctgcttctggtgtgtgacgaggcccccgatgttcttgattttcccagagaagcaaataaacagcgtgaacagccccagttcctggagttcttgcctttcaacctggcgaggaaggcgtggccaggccagggggtggggcctgccggcctttgagccattaaagggaggctgagcagggttgcggtgtgctggcttcacctgcctgcacccgctcaccctgagcgccttggggtggtgggaggcgctggaatccccactgtgcaggtaaggcctggctgtaaggggctgctgtgggggggcaggactggcttcccggggggccctcgggttctgcggccgccccgtcctgtcctttgttcctccctttgctgggctcacagcccctgggtgatgacagagggtcccctggacacccacaagctctgtagagaagccggcccctgggaaatacacaggaggcctggggaggaggtgtctgtagagaccagtgtcatgctcacgggaaggtgctgccccgccagccccactctctcacgctgtagtcttggagaagtcgctgcctcctctgggcctcagttttcccatctgtaaaataagccttcgtggccgggcacggtgtttcacacctgcaatcctagtactttgggaggccgaggtgggcggatcacaaggtcaagagatcgataccatcctggccaacatactgaaaccctgtctctactaaaaatacaaaaacttagccgggcgtggtggctcacgcctgtaatcctagctattcaggaggctgaggcaggagaatcgcttgaa[131 bp omitted]gggcgtgggacgtctccacagtgcccccagctcatgggcgatccagcctccaccctgctggggcctcagttttccccgatgaggtggtgagtgtggtggagagcactgctgagggaactcaggttccaattccagcctaaacccccgccattcctgaggcgcgattttaagctttccgtacctccgtttccctatctacaagccagggagaaaaggacgtgaagggggtggcgggaggcggcggtgggaggcgccgtgaggccgcgcaccctgagctttcacacacccagcagcgttaggtgccacgctgtcctttgggggccctttatccagatttgtccttaaacacccccatcttggccaggcgccgtggctcgcgcctgtaatcccagcactttgggaggctgaggcgggggcatcacctgaggtcaggagttcgagaccagcctggctaacgtggcaaaaccctgtctctactaaaaatacaaaaatagctgggcgtggtggctcatgccagtaatcccagctactagggaagctgaggcaggagaattgcttgaacaggggaggttgccgtgagccgagatcgtgccactgcactccagcctgggtgacaagagcgagactccgtctcaaaaaaaaaacacaaaaaaagcacccccctcctgagcagccctgctggattcgtagctgggggcctttttactcgaagaagagactgaggttcagaggggctccacaagcagcccctctggcgtaggtcaggacagagccccagcctggggaactgaagtccctgccccctcagctgtgttccctgccctcatagacggcgctaggcccagtggcccgacttccccacagatgctgggctccccacagtcccagcaaggcctctgcaccttgactaagaatccaggaggaccatgggcgcctgagggcctctgcgtccccatctctcggggtggcctgggtcttttgacggcctcgtgcggttcttttttttttttttttttttttttttttgagttggagttttgctcttgtcgcccaggctggagtgcagtggtgtgatctcggctcactgcaacctccaactcctgggttcaagtgattcttctgcctcagcctcccaagtagctgggattataatagcgtgccaccataccccgctaaattttgtatttttagtagagacggggt[135 bp omitted]cctagggaattcctcccagcagccctgagggagcccgggcgtgatgttcccccacgtcccggaggagaaaacagggctaagagaggtcaggtgggatcagaacccaggccacaccaaacccccccgagtctgccaaacctggtttatgcaagaagggggccatctaggggagttgccccaaggggtgggctgggccagaaggcacggacgggattgggactcagcccctccggccccccaggagacacaggccactgtgcacgctgagctgctgtgtggccctggacacctgctgaccctctctgagcggtgctgagaggcggtgggagggccaggcagccaagggaggtttcggctgagttctggctcctcggggccacctggaggccctgggggtggaggggcagccggcagcgggcacggtgcccgcccttgcccagcctggtatcctctttctccctcctcctcctctggactttgtttcctgatcccaggtggggctggggggagggggcacacctgcctcccctgggtggggcctctgttccctggcaacctggcgggcagggcggagctgggaggcctctgtgcccatcgaggagtcagagtggaggctgcagactgtggagccgggagccggcaggtgaggctgggggcgccccgggccgggccgggcggggatcctgtgtggggcggttggatccacatttggcgtgggagcgtcatgtgtctgtgggcggggtctgcttgcctggcggcacttgggatccagggaggccccctgccccaccccgtcaccctcggagcctccctgaggcacctttccctctgcccccgctaggtactctggggcctcaagggcacccactgggagagcagagaggcccttgtccctgaactctgctggggcttttgaaccccaaatcccagagccctccaagggaggggccgggttggcacccccatggtcagaggccagaggggcccctccatggttctgggaattccagaggcttctggagagatgcttatccgtcccaccaggcccctgactgggaggctctgggcagtaaacacccccgtggggctgggggctggtttggggacacggaggaggggtggctgagtacaggcggaaggagtctcaggccggggctggggacttggcctgggtcctcgggtgggggtgaggtggtagcctgggatcccgggcagccagcagggactcggcccagcgtctgccggtggagctccgcccaggagcccaaggagctgagatgactcaagggtgactgcaaccctgagggatgggaaaaaggaacggggccctcccttctgcatggcctccttgtctgagtctcggccccacaagggaacctttgcccctcacatagagccaactggctgatgaggaaggaggtgtggcaccagggtccataaacccagtttcattctggtatcaacagagttcagggtgaggctgggaggagcaacccagggggcttcctgtaggagggggtgatttggagcaaagtctgaaaactggcttcagacacttgctctgtcatcgctgtgtgacctcagatgagcaggttctcctctctgggtcccagctccctctctcgaaaaccggagtcgaaaacggttccaaggtgttgcaggaagagtctcaggacgccgaggtccttagccaccgccgggccttgcaggggccatcttccgtcctggggctcttcccccgagggcagcgccgctgcccaagaatgccggccatgagagccgccgtggatccaggggtttttttggccgacacagtgaaaccccatctctactaaaaatacaaaacttagccgggcgtggtggcgggcgcctgtagtcccagctacttgggaggc[136 bp omitted]cacaggcagcaggggagggggcccagtggccttgaacccaagagctggaccccaggccccacccgctggcttcagtgaatcactggggaggaatgagcagaggaggatgcgtgccttcatccccacccaaccccgaccccactgggagacccggcacctgctcgaggctgggcggacagctccctttctcccggagttgacgtctgatgtgggttataaatcccgctgtgtaaacgtctgtccactcactgggcaaacattcctacacccgccctccccggggagctccagggtgcagggcgtggacctgcccagcccttcagggccagaaggcacggtggagccggtctgcattccgcaatgagcccgacccccacgtctgagcagctgggatgagtggtgtttgcccagccagtatttattaggcgcctgctgtataccagactctgggctgcaggaagggtgctgacctgtggccacagcaggcgagagcgaggcctgggctgacggtttcgggtgggagaaggcaaggccttccgtgagctgggcaggcggcgtccacggaggaggaggcctcgggtcaggggagccatctgtgcgtcacgctttgggaggaagctcagctgtttgtgtgggatttattcaccaatgccgcctggttttcaatgtttcccctattttagtttctgacatttgatacgcgcggaagattgcatgacacattgcgtgtagtttcaacacggctccccacggtctctccactttatgctgtttgatgccactttccagttcagagaggggctaagtttttctttttttttctttttttctttttttttttttttgaggcggagtctagctctgtcaccaggctggagtgcaatggtgcgatctcagctccctgcaagctccacctcccgggttcacagcattctcctgcctcagcctcctgagtagctgggactacaggcgcccgccagc[139 bp omitted]tctgtttaaaaacaaaaaaaaatgctgctggttggtgtaaaggcagcagatctaaataatagccttggtggcccgggagcgacagtcctgctttgtgggggtttgtttttcttttgagacagggtctttctctgtcacccaggctggagtgcaatggcacaatctcagctcaccgcaacctccacctcacaggttcaagtgattctcccacctcagcctcccaagtagctgggattacaggcctgagcccctgtgcccagccgacagtgctttttttaggagtcaggagctcaagcttttgagatccctgtgtcttcaggtgaggcttcctttcctcaactatgaaagatgatgtctgctggacacggtggctcacgcctgtaatccctgcactttgggaggccgaggcaggcggatcacctgaagtcaggagttcaagaccagcctggccaacatggtgaaacccgtctctactaacaatacaaaaattagccgggtgtcctggctgggcgcggtggctcacgcctgtaatcccaacactttgggaggc[269 bp omitted]tgcccgtagtcccagctactcaggaggctgaggcaggagaattgcttgaacccgggaggtggagattgcagtgagctgagatcacgctaccgcagtccagcctgtgcatcgcagcgagactctgtctcaaaacaaaagacaatacctaagacgggtgctgggtacaaggcctgacatgaaggaggtgttcagatgatggctctgggggaggggcaatctgggttacttcctggaggaggtgtccatgggcttcagcagaggaagccgtggagaagcagaaacaggcagcctcgagacagagagagctgcaggtagaggaggagggcgaggtttggggtggaggaagagggcctggtttggggtggaagaggagggtctggtttgggttggaggaagagggcctggtttgggtggaagaggagggtctggtttgggtggaagaggagggtctggtttggggtggaagaggagggcctggcttggggtggaggaagagggcctggtttggggtggaagaggagggcctggtttggggtggaagaggagggtctggtttggggtagaagaggagggcctggcttggggtggaggtgcccacagaaattggggtttcgtgctaaggccaggagcagggtgtgagaactgtgccctgcagatgccaggagccacagaagcgatgcgagcaggtgtgtgacctccgggaaggctcctggaactgagcccagcagcaacctggacccttgggagagggcgagagccggaaggcactgggtcagggtgtcacccgctcgctccacggccccacctgggcccagcgggacaaggtccacggtgttcctttgcccatcctggctttatggcgacaaggcccaggcggggatgttgtctcagatgggacgaggtgtccagctgggcagggcagggtggagaaccaggatgtgggagccgggaaactggagttgctgtcagtccttctctctgggcctcagtttctccatttgacatcccttagcaaggggccatctgtaattgtcagatggaaaaatcccacaccaggagtctcagagtgagctcagggtggaaaggctcagtgcacaggagacacagataaatatggtgcggccaaggaaggcttcagagatcaaggctgaggccaggcgcggtggctcacgcctgtaattccagcactttgggaggccgaggcgggcagatcacctgagctcaggagttcgagaccaacctggccaacatggtgagacctcgtctctactaaaaatacaaaaaattagccggacttgggaggttagcgcctgtaatcccagctactcaggaggctgaggcacgagaattgcttgaacctggaagcagaggttgcagtgagctgacattgtgccactgcactccaggctgggcaacagagcgagactccatctcaaaaaaaaaaaaatcaaggctgagctggactccacagggcaggtgtgtgtgtctgggagataaggtgggcagggcaccctgattttattgggctgcaaatgttagaaacatataatgcgagttgttggggtagtaaccgggacattcagagattcaggtatggttggaatcagggagcttaaaagttttcaggatgctttgctggtgttggggttgctgtcaagcaagctgtacccactgggggcatttacgtccccagcaattcactatctcattccatcagcctaacaagaccagcgggaagagggtcccatcttctgcattaattgtaaagtcccagggtctcatgtcattggctagactgggtcacatgctcatctctgaaccaattacagaggccagagggtgaaatgctctcactggctggactaggtcacttacccatctttgaaccaatcacagaggccagtgggtgggatgctctgattgatcaggatgagtcacttacccatccctgaaccaatcacagaggccagagaatgggctactctgactggccaggctgggccatttactcatccttgaaccaatcacagaggccagaaggtgggatgctctgattggccaggctgagttacttacctatcccttagccaatcacagagattagacaatgggctgctctgagtggctgtactgtgtcacgcacccctaaaccaatcacagaggttagagaatgggatgcactgattggctggactgtcacttacgcacccctaaaccaatcacagaggttagagaatgggctgctctgagtggctggactgtgtcacttacccatccctaaaccaatcacaaaggccatttgatggaccctttgccctttgggggactggaggctgttcctctccctaggtgctctgacttgatggccctcatttccttctcctccctcagtaagcccagaggtctccaccccacgggaggaaggctgaggccaagaccccggaagagatggaccgcgtgaccagataccccatcctgggcatccctcaggcacaccgtggcaccggcctggtgctggatggagacaccagctacacataccatctggtgtgcatgggccccgaggccagcggctggggccaggatgagccgcagacatggcccactgaccacagggcccagcagggcgtgcagaggcagggggtgtcctacagcgtgcatgcctacactggccagccgtccccacgggggctccactcggagaacagggaggatgagggttggcaggtttaccgcctgggcgccagggatgcccaccagggacgtccaacatgggcactccgcccagaggacggggaggacaaggagatgaagacctaccgcctggatgctggggacgctgaccccaggaggctgtgtgacctggagcgggagcgctgggccgtcatccagggccaggcagtcaggaagagcagcaccgtggccacgctccagggcactcctgaccacggagaccccaggacccccggcccacctcggtccacgcccctggaggagaacgtggttgacagggagcagattgacttcctggcagcgagacagcagttcctgagtctggagcaggcgaacaagggggcccctcatagctccccggccagggggacccctgcaggcacaaccccaggggccagccaggcccccaaggccttcaacaagccccacctggccaacgggcacgtggttcccatcaagccccaggtgaagggggtggtcagggaagagaacaaggtgcgtgctgtgcccacctgggccagtgtccaagttgtggatgaccctggctccttggcctcagtggagtccccggggacccccaaggagacgcccatcgagcgggagatccgtctggctcaggagcgtgaggcagacctgcgagagcagagggggcttcggcaggcaaccgaccaccaggagctggtggaaatccccaccaggccgctgctgaccaagctgagcctgatcacagccccacggcgggagagagggcgcccgtccctctacgtgcagcgggacatagtacaggagacacagcgtgaggaagaccaccggcgggagggcctgcacgtgggccgggcgtccacacccgactgggtctcggagggtccccagcccggactccggagagccctcagctcagattccatcctcagcccggccccagatgcccgtgcggccgacccagctccagaagtgaggaaggtgaaccgcatcccacctgatgcctaccagccgtacctgagccccgggaccccccagctagaattctcagccttcggagcattcggcaagcccagcagtctctccacagcggaggccaaggctgcgacttcaccaaaggccacgatgtccccgaggcatctctcagaatcctctggaaaacccctgagcacaaagcaagaggcatcgaagccccctcggggatgcccgcaagccaacaggggtgtcgtgcggtgggagtacttccgcctgcgtcctctgcggttcagggccccagacgagccccagcaggcccaagtcccccatgtctggggctgggaggtggctggggcccctgcactgaggctgcagaagtcccagtcatctgatctgctggaaagggagagggagagtgtcctgcgccgggagcaagaggtggcagaggagcggagaaatgctctcttcccagaggtcttctccccaacgccagatgagaactctgaccagaactccaggagctcctcccaggcatccggtgagaaggggctccagggagtggctgcttggctcagggtctcagaggttggagcaggggagggtggggaggtggagtttgaggctgtcaaagggctggggttggggagacattgcctcctgactgttcatcccctcagtcgctggtttgtctgcctgtctattaaaaatgtagattttggagagaaatgtcaactttaccttagggcttttgctttatggatttggatgccttgttgttaggcgcataaatgttcatatatgttttgtgt[137 bp omitted]tgcctcagcctcctgagtagctgggattacaggtgcccaccaccactcccggctaatttttgtatttttagtagagacaggtttcatcatgttggccaggctggtcttgaactcctgacctcaggcgatccaccctgccttggcctcccaaagtgctgggattacaagcatgagccactgctcccggcctgttcatatatgtttatcctcttggacagttgcacctttttgacaatatgaaatattccttgtgtcacttttaatgttttttttttttttttttgagatggagtctcgctctgtcacccaggctggagtgcagtggcgcgatctcggctcactgcaagctccgcctcccgggttcacgccattctctcgcctcagcctcctgagtagctgggactacaggcgcctgcctccacgcctggcta[176 bp omitted]tccagtttctcctgactggctactttggtcaatctgtcagtttcccggatagtcatctgctctgtctgtccatacatctgtctccttagctgctggctagagactctgtctcccgagcagaggtctgacaaatgttctaatgttctgccctccctgctcccctacaggcatcacgggcagttactcggtgtctgagtctcccttcttcagccccatccacctacactcaaacgtggcgtggacagtggaagatccagtggacagtgctcctcccgggcagagaaagaaggagcaatgggtgagtctggaacccgtctctgcagaggccaggctgaggtcagacagcccctattagggccacaggaagttcaagcaggactcaagcctgacctgggttcaagcactacccccacccctggccgtgcctcagtctcctgcagatgtcaggtagaagatgataaacttggtgtccttgtatctctgggcttctgcttggagaggccatataagctggggtctttgtccccatcaggaggtcatctccaggatcaaagaccaaaggaccaactctgcttggaggaggaggacactggcaatttgtcatcgtcaccagcattagtttctttttttttttttttttttgagacggagtctcactctgtcgcccaggctggagtgcagtagcacgatctcggctcactgcaacctccacctcccgggttgaagtgattctcctgcctcagcctcctgagtagctgggattacaggcgtgcaccaccacgcccggctaatttttttgtatttttagtagagacgtggtttcaccatgttagccaggctggtctcaaaccgatctcaagtgacctgcccacttgggcctcccaaagtgctgggattataggcatgagccactgcacctggccacagatatttacttctaagaaagagagagagagagagagaaggcaggagggagggagggatggagggaaggaaggaacaaagcgaggaaggaagggagggagggagagggagagacggagggatgtgtctgtcacacgctggctcggggcttccaatgaaccacacctttagcaccctggtggtctcacatgcccagggttaggcagctcatgaacccaggcttgactccaggacctacaggccacagagctttgccttaggggttttactttatgaattttgatgccttgttgttagacatgtaattgttcatgtatgtttatcctcttggatgagagctccttttgtcagtatgaaatattcctcacgtcacttttaatgacacgaggaatatttagtgccatgaggaatattatgtccttttttttttttttttttttttgagatggagtctcgctctgtcacccaggctggagtgcagtggcacgatcttggctcactgcaacctctgcctcccgggttcaagcgattctcctgcctcggcctcccgtgtagctggaattacaggtacgtgccaccactcctggctaaagggaggctgctagggaggctccatccgggaggtggaggttgcagtgagccgagatcgcaccaccgcactccagcctgggtgatagagcaagactcagacccaatataaataaataaattaattaattaaattaaataaatcatgaatgttggacagaggctgcactgaggggaacagcatgaggaacagcaagggggatggctgtgagtctgggtgatcgtgggacacgtgttgagaacactcagggcaggggatgccttccactcttccccaaatggtgacagagagggctgtgtgggagctctggtcggactctgcaccgggcagggcagaaaggcctgggctgacttgtgttcctttcctgtagtacgctggcatcaacccctcggacggtatcaactcagaggtgagtatgctcctgggcacgaagactcaagtctttcccccccacatctgtgcccctgcacacaggggccaacggaagccccttcctccaggtgtggggatcgtattgggtgtcttctcaattggtagtgtctgctcagggtggattttgctgtgatctgcttgtgatgtctgccatgggcatggattaggagaagagggttcacatgccacctctccaccacgtggtgaaggtttgtgaggttaga[147 bp omitted]ctgcctcagc[215 bp omitted]cgctctgttgcccaggctggagtggagtggcttgacctcggctcactgcaacttccgcctttcaggttcaagcgattctcctgcctcagcctcccaagttgctgggattacaggcacccaccaccatgcccagctaatttttgtatttttagcagagatggggtttcaccatgttggccaggatggtctcgaactcctgacctcaggtaatcctcccgcctccacctcccaaagtgctgggattacaggtgtgagccaccgcacccagccaaaggcactttctttgaggaaggtatgcatctgagactattcaagccaagccccctcagtcggtttatggcacacgtgtgtggccctcctttttatttttatttttttttatttttacttttttgagacaggctctcactctgtcacccaggctggagtgctatgatgtggtcccagctcactgcaaccttgacctcctgggctcaagcaatcctcccacctcagcctcccaagtaggaacataggaatgtgccactgcacccagatagtttatttttatttatttatttatttatttttgtacaggcagagtctcactaggttgcccaggctggtctcgaattcctgcattcaagggatcctcccacctcagcacaccaaatttctgggattataggcatgagccactatcgcctgacccctctttgagctgaatccgaaatgccaaatacattggacaggcacggtggctcacgcctgtaatctcagcactttgggaggccgaggcgggaggatcatgaggtcaggagatcgagaccatggtgaaaccccatctctactaaaaatacaaaaaattagccaggcgccgtagcgggcctctgtagtcccagctactcaggaggctgaggcaggagaatggtgtgaacctgggaggcagagcttgcagtgagccaagatcgcgccactgcagtccagcctgggcaacaaagtgagactccatctcaaaaacaaacaaaaaagccaaatacagacatttttcctgccctggagctcagcatgagttagcatattctttgatcatattactaggagtagagggtctgaaacagaggaggggatcctactttacccccgttctaggcctctctaatgaattggcagttggaggagacatcttgggggtgtggtaggacctggatcgggggaattcatgcctcctttttgcaggtcctggaagccatacgggtgacccgtcacaagaacgccatggcagagcgctgggaatcccgcatctacgccagtgaggaggatgactgagcctcgggatggggcgcccaccccctgccctgccctgaccctcgtgggaactgccaagaccatcgccaagcccccaccctaggaaatgggtcctaggtccaggatccaagaaccacagctcatctgccaacaatcccaccatgggcacatttgggactgttgggtttttcgtttccgtttctatcttcctttagaaatgtttctgcctttggggtctaaagcttttggggatgaaatgggacccctgctgattctttctgcttctaagactttgccaaatgccctgggtctaagaaagaaagagacccgctcctccactttcaggtgtaatttgcttccgctagtctgagggcagagggaccggtcaaagagggtggcacagatcgcagcaccttgaggggctgcgggtctgagggaggagacactcagctcctccctctgagaagtcccaagctgagaggggagacctgcccctttccaaccctgggaaaccatccagtctgagggaggaggccaaactcccagtgctgggggtccctgtgcagccctcaaacccttcaccttggtgcacccagccacacctggtggacacaaagctctcacatcgataggatcccatgaggatggtccccttcacctgggagaaaagtgacccagtttaggagctggaggggggtctttgtcccccacccccaaactgccctgaaataaacctggagtgagctgcctgccttggtccctgcctggtccggacaaagtcccctgggcctccactctctgtttcattttcttggcgacattaggttccaccccgctaggccgtgagcctgtggggctgtcaggttcccatgggggggttgccagcatctgcatgcagtaggtgcttagctgatgcttgttgagtgactgacaattgatcatggagaggcaccttcagcaacaccaggcccggggcccaacctcaccagcccggctcctccagccccgtctcaccacgtccatcgcagtacccagggtgcttattaagcatttgctgaatccctcaccactctggtctcagaggaggccggagggtcattaattcggctccgcatgtataccaggctcacatccagggaagccagatcctactggtcagaggcgtgggcgctggacccaagtcctggctctgctgcctgctgtgtggccttgggtgggggggggtcctctcactgccccatgcctcagtttccctctgacacacagggataacgataggaccaggctcccgggcagtaggagttaatttacgtaaagctctcggcacatggggaccattgacgttggattcagtgcctgatggcaggggcgtgtcctcagacaccccccaaagcaggcctcggcccccaggctcccccaaccctgctgggagcagcgggtgttaattacacctaggccagtgtctcctccttggctgctcagtgtccgctgcgctgcctcagggaaaaccgcgcagccacgccgggcccaggcaggcagatgtggaaccgaaatagctgggcagtgggggctgtggggaccctggggaggcgggggaagggggctgaggggctacatctgggcagagcagagactgagggaggagggagagcccctgtcttcagggagaccccagtctgatggaggaggcatctgccttcacagagatcccaggctgatggaggaggcccctgcccccagggagaccccagtctgacggaggaggcatctacccacagaggggccacagtctgacggaggaggcctctgccctcagggagaccctatctgatggaggaggcatctgccctcgggggaccccagtctgatggaggaggcaggttatgtgaccatagagggaggctcagtggccatagttggtgacttctttcatgtcggggcaattctattccaaccccaagaaccaaacgtggggcctgcgggaagggagggcctcacacacagtcctgggtgagtcccatcagtttctccactgtctgccaccccatcttcccccgatgccccatgttctgtccctctgtccctgtgctctgaggatgtgtgagcctccactggctactataacaaatcaccacccacctaatgacttaaaacagcagacatggttgggcgcagtggctcacgcctgtaatcccaacactttgggaggccgaggcgggcagatcacctgaggtcaggagttcgagaccagcttgaccaacatggtgaaagtccgtctctactaaaaatacaaaaaattagctgggcctggtggcaaatgccagtaatcccagctacttgggaggctgaggcaggagaatcacttgaactggggaggtggagattgcagtgagccaagatcgtgctattgcactccagcctgggtgacagagtgagactctgtctcaaaaaaaaaaggcaatctctccctgtctctctcaggctcaccttcctgcctcctctcgtgagggccctatgaggacactgggcctccatgtcacccaggatgttctcctgtctcacggtccattactcagtcccatctgcaggtgcttctgccacgagaggtgacacggccacaggtcccggggattaggaaagggatgtctttggggccattgttctgcccaccagaggatctcgacatcccccttctccgtgactcttcagtcacctctgctcagggccggccaggactgttgcacaggctgtgccctgcacaagccccctgccaagaccaaagggcaaggctctgtgtgcggccagggtccccgtcttcagtgtccctggccctggctgtggcctgttgccagacaccgcgtcaccaaggggtgcattattcccacatcatcccagttggacggtcacctcaccctgcccatcgtcctgccagcaagatggtcccacagcggcctcagttctcagaggctcggcagggtctcccctgaccccgtaatgcccctcactgcccctgggcgctgggttcaagaagaaccgcctgcttcgttgcaggaagtgatgtccacccccaactctggatcggaagccacgatctatcctccagacccaacaccaggtccccagccctttatctctcctgtctgtctgtccatttctggtgttcaggcctctctctccacgtctatctccctgtttctgtccctcctgacctctctctttttccatgatttttgctttcctccctccc[134 bp omitted]cccacctcagcctcccgagtagctgggattacaggtgcccgccaccacgcccggctaatttttgtatttttagtagagacggggtttctccatgttgggcaggctggtctcaaacccctgacctcaggtgatccgcccgcctcggcctcccaaattactgggattatgggcgtgagccaccacgcccggccctcatcctaaattcttaaaacctgctctcctctcagccatgattttctttgtcctgtgccataaagaattctcagaagcaggatgcagcttctgctgctcaagggtgagcccagccagtgggatctggtgtcgctgcccgcagacccctcagtcaagagcggggtggggggcagcaggagctacagtaacagcccggatggtcctgctcctgaaggcaccccaccctgctgtccagaggagagaccgaggctcagacatttgagccccacataacccagcctgccacacaccgcagactccaacagtgtagcccctgtaccccagaagtcacttcagcaaatcactcagggctccacctcacatctgtccccaagtccttggggacttgctcactcagcagaagaccaagagaagccagatgcagtggctcacacctgtaatcccaacactttgggaggctg[135 bp omitted]aggcaggagaatcctttgaacccaggaggtggaggttgcactgagccaagattgtgccactgcactccggcctgggcgacagaacaaggctccgtcctaaagaattaattaattaatttaaaaataaaaagaaaatgtgcactttcatcttgtattattctgtccttttgtttgtttgagataaagtttcgctccatttgcccaggctggagtgcgtgatctcggctcaccgaaacctctgcctcctgaattccagtgattctcctgcctcagcctctcgagtagctgggattacaggcccacgcccccaccatacccagctaattttgtacttttagtagagacagggtttctccata[137 bp omitted]agtcactcacacctgtaatcccaccattttgggaggccgaggcgggcggatcacaaggtcaggagatcgagaccagcctggccaatgtggtgaaaccctgtctctactaaaaatacaaaaattagccgggcgcagtggtgcgcacctgtaatcccaattactcgggaggctgaggcaggagaatcgcttgaacccgagaggcggaggttgcagtgagccaagatcgcgccacggcactccagcctgggcgacagagcaagactgtgctcaaaaaaaaagatttagtttaattcctgtaatgagtcagccccttggaaaatcagacagaattctgcctgctgagcagacacattccagaagttactctgtgagaggtttagacgaattcctagtgaaatttccaggggcgggagagcgtgtctggaaggtctgcggacatcacagcaatcacagaggcctttggggcgggcaaaactgtccgctggcgctcgctgctagcaggagggagttcatattctttcctggtttcctcctggctcagtgtatcatgatatgccagggaaaggaggagaattctcttttttgtttgtttggttttttgagacagagtctcacgctgttgcccaggctggagtgcagcggcgcaatctcagctcaccacaacctctgcctcctgggttcaagcgattctcctgcctcaacccccggagtaactgggattacaggcacccaccaccacgcctggctaatttttgtatttttagtagagacggggtttctccatgttgggcaggatggtctggaactccagacctcagatgatccacccgcctcagcctcccaaagtgctggggttacaggcgtgagacactgcacctggcctcaactccattttaattaaccctgcaggggccaggcatggtagctcatgcctgtaatcctggcattttgggaagctgaggcaggaggtggatcacctgaggtcaggagtttgagaccagcgtgaccaacatggtgaaaccctgtctctaggaaatacaaaaaattagctgggcgtggtggcaggtgtctgtaatcccagctactcgggaggctgaggcaggagaatcacttgaacccaggaggcaaagatcgtggtaagccgagatcgcaccattgcactccaggctgggcaacaagagcgagactccatctcaaaaaataaaaataaataaataaaaaataaataaaaataaaaaaaattagccaggcgtggtagcgcgtgcctagtcccagctactcaggaggctgagacacgagaatcacttaaacccgggagatggaggttgcagtgagctgagatcgcgccactacactccggcctgggcaacagagcaagacttcgtctcaaaaataaataaataaataaataaataaaataaagagatttaggagaggacacaagcaaacataactcagactgactttggcaaaactaggctttatgggttcccgtaactgaaacatcaatgtagggccagcttcaggctcagctggttccaggtgccacacagcatcctcaggttccttcggtgttgggagctcaggctccaagcccaggacagattcccagctctgccacatgcccctgagggaccctgggcaaggcctacccctctcccagcctcagtgtccttatctgtaagtgaagtcgccacattgacatccctgccctgggggacgtcatgag[138 bp omitted]tggctaacatggtgaaactccgtctctactaaaaatacaaacaattagccgggcgtggtggtgggcgcctgtaatcccagctactcgggaggc[144 bp omitted]caagtaaattaacgaattgtcaccagacaatgacttccatgtgactttctggtgtgagccggagaggagccgatgcacgctgccaccagagggcggcaaacaccaaggatgcagccgcggccctcgccccgccagggagaaaacgcacctgccgccactctcaccttctcattcccgta[131 bp omitted]ctggccaacgtggcaaaaccccgtctctacttaaaaaaaaaaaaaaaaatagccgggtgtgatggcgttcacctgtaatcccagctactcaggaagctgaggcaggagaattgcttgaacctgggaggtggaggttgcagtgagctgagattgagccattgcactccagcctgggtgacagaggaagactccatctaaaaaaaaaaattatttgtagagatgacagagtgagactccatctaaaaaaaaattatttgtagagatggggttctcaccatgtttcccaagctggtcttgaactcctcaagtgatcctcctgcctcatccccacaaagtgctgggattactggtgtgagccatcgagcccagccctgaccaac[132 bp omitted]aaccctgtctctactaaaaatacaaaaaaattagccgggtgtggtggggggcacctgtagtcccagctactcaggaggctgaggcaggagaatcacttgaacctgggaggaggcggagcttgcagtgagccgagatcgagccactgcactccagcctgggcgacagagtgagactccgtctcaaaaataaaaataaaaataaataaataaaattagccggaagtggccgagtgcggtggctcttccacagcagccagagggcgcctgtgaggctgactgggggtgtccctgctctgcccacagccctccatggctcccatttccctctgggtagaagcccaagtcctccgtgcagcccacaaggctctgcccagtcccctctctcctctccctcctctgtctactctccctcctccctgtctccccctcctcctctgcccagtcccctctctcctctccctcctccctctctcctctccctcctccctccctatctccccctcctcctctacccagtcccctctctcctctccctcctccctatctccccctcctcctctacccagtcccctctctcctctccctcctccctttctccccctcctcctctacccagtcccctctctcctctccctcctccctgtctccccctcctcctctgcccagtcccctctcctctccttcctccctgtctccccctccctcctccctgtctccccctcctcctctgcccagtcccctctctcctctccctcctccctgtctctccctcctcctctgcccagtcccctctcctctccttcctccctgtctccccctccctcctccctgtctccccctcctcctctgcccagtcccctctctcctctccctcttccctgtctccccctctgcccagtcccctctctcctctccctcctccctgtctccccctcctctgcccagtcccctctctactctccctcctccctgtctccccccttcctctgctccagccacacgggcctcctccctgttcctccaacttgccaggcggggtcctgccccagggcctttgcctccccaggtgaggtccggccccagggcctttgcacggccatgtcctctgcctggtttcccttccctaggtacccactgggttcatttcttcacttctttcaaggctttggtgaacgctcccctcatcacacagctgttgctcagtaaatatggcagaataaatagctgggcagggctcagtggctcatgcctgtgatcctagcacttctggaggctgaggcaggaggctcacttgagctcaggagttggagactagcctggccaacgtagagagactccatctctacttagggtgaccaggggagagaacaaaatcatgggctcattttttttttttttttgaaatggagtcttgctctgtcgcacaggctagagtgcagtggtgagatctcggctcactgcaacctccacctcctgggttcaagcaattctcctgcttcagcctcctgagtagctgggattacaggcacatgccaccacacccggctaattttgtatttttagtagagacagagtttcgccatgttggccagggtggtctcgaactcctgactgcaggtgatctgcccgcctcaccctcccaaagtgctgggattacaggtgtgagtcactgcacccagcaaaaaatgtttattattcccatttcacagaccagcaaactgaggcccagagggagccgcctgaggaaactggattgcgcagctgatggagtctcaaccagagaaggggcccgtggggcctagattcagacttccggctgtgcaggcaagcaggagggccccccagtcagggtccccaggacaccaaccccaagccaaatgaggccaccagaggctgtgcccagccccagtcccgcacggggcaggtgtggagcaaatgctggcgggatagagggatggagaagggggctgcctgggagtgaggggctgggtgccccacccacctggcctcagcctcctgccctatccgagaacagagctctggtttcctgcccggcagcccgtgaggagcagcgaggcatggccagctgggggccggacagtcctgaagagcttgaggactggctcctggctcctaaagcatagcgccggctctggggatctgccagggagagaccagctccagggcccctggatgcaggttagagctcaggctgtcccctgatggcctcggtgctatgggtgagtttctccacctctctgtgctcagcctctcaccggagagggggtgggtgatcctggcctgagtaggtgaccaaggcatcctcctctgtggctggtatttcccaacaccctcaataaattcacaggtggctcaggcctgtaatcccagcactttgggaggccaaggcaggcagatcacctgaggtgagcagtttgagaccagcctggccaacatggtgaaaccttgtctctactaaaaatacaaaaattagggccgggtgccatggcacatgcctgtagtcccagctactcgggaggctgaggcaggagaatcgcttgaacccgggaggcggaggttgcagtgagccaagattgtaccacttcactccagcctcagcaataagagcaaaactccatctcaaaacaaaataaaaaataagggcgcagtggctcatgcctgtaatcccaacactttgggaggccaaggcaggcggatcacaaggtcaggagattgagaccatcctgaccaacatggtgaaacctcgtctctactaaaatacaaaaaattagctgggcatggtgacgggcgcctgtaatcccagctactcaggaggctgaggcaggggaatcgcttgaacctgggaggcagaggttgcagtgagccgagatcctgccactgcactccagcctgggtgacagagcgagactccatctcaaaaaaaaaaaaaaaaacaaaaacaaattggtttgtttattttcctgttgatttgtgggagttctttatatattctggacctgagtccttgattacattatgcactgctagctagtaccttctcccagtctggcactttccttttgagtcttcttctttttttttttttttttttttttttctgaggcgcctgccaccacacccggctaatttttgtatttttagtag[143 bp omitted]caaactcatttgttcaaaataaaatgcaatttttttttttttagatggagtctcactctatcacccaggttagaatgcagtgggacaatctctcccaggctcaagcgtctcttctgcctcggcctcctgagtagctgggattacaggtgggtgccaccacgcccagctaattttgtgtatgtttagtagagaccaggtttcaccatgttggccaggctggtcttgaactcctaacttcgagatccgcctgccttggcatcccaaagttctgggattacaggcatgagccactgtgcctggccatgttaggatatttctttttttcttttcttttcttttctttttttttttttttgagagtctcgctctgtcacccaggctggagtgcagcggagccatctcggctcactacaagctccgcctcccaggttcatgccatctcctgcctc[224 bp omitted]aaccctcaatttgaggttgcaaaccctgtttcctgctaagccagacagatggtgctggagatggggaggccatggtttatgttttgtccactctgggtgctgcctggacaggtgactcatgcatgtggcggagcagtccagagtgaggactgtacccctacagacactcccccagaccatgctggtggcctgagctgggggctgcccaagtcccctccccgggatccacttctggggcctcccaagccttccctggggtcagtgagtgctggaagggcagccagcagtgtgtgtccacgggggggggcgggtcaccacttatctgggcattaaatatttgggggggtctcaaaataatggaaaacagggggccagaagtggtggctcatgcctgtaatcccaacactttgggaggccgcagtgggaagatcgcctgaggtaaggagttcaagatcagcctgggaaacatagcaaaaccctgtaatgaaaaacccaaaaattagcccggcgtggtggcaggtgcctgtgatcccagctactcgggaggccgaggcgggaggactgtttgagcccaggaggttgaggctgcagtgagctatgattgcaccactgctctccagcctggacaacagaacgacccactttctcaaataaataaataaataaatacgctgaggccaggcgcggtggctcacgcctgtcatcccagcactttgggaggccgaggtgggcggatcacgaggtcaggagattgagaccatcctggctaacatggtgaaacccccgtctctactaaaaatacaaaaattagccaggcgtggttgcgggcacctgtagtcccagctactcgggaggctgaggctggagaatctcttgaacccgggaggctaaggttgcagtgagcccgagatcacaccactgcactccagcctgggtgacagagtgagactctgcctcaaaataaataaataaataaatattaaaataaatagggcc[178 bp omitted]gaggcaggagaatggtgtgaacccgggaggcggagcttgcagtgagccgagatcgcgccactgccctgcagcctgggggacacagcgagactccgtctcaaaataaataaataaataaataaataaataaaaataaaataaaataaaataaattaattaattaaaatagagatgagatctgcctctgccgcccaggctggagtgcagtggcgtgatcatagctcaccgcagcttccaactcccgggctccagcaatcacaggacaaacctcccgcccggccctgcagccaggtgctcacaccagccctatttataacaggaatccatggaaatttctggccccaccaagctgctgtcatgaataagtcatcgtccggatcaatgattccacccagggagcatctgcaagtttccacctcgttctccctgggccccggacagcctggctgggacgtcagagctaccagtcaggctgcggaaacagcctgggggttcctctgtgaccaaaccattccacgccgtggtctctacccagagaaaggaaaacacaggtccatacgcgtgttcgaggcggcatgattc[158 bp omitted]ccgggcatggtggcaggtgcctgtaatcccagctactcgggaggctgaagcaggagaattgctctagccagaagggtggaggttgcagtgagccaagattgtgctgctgcactcagcctgggagtcagagcgagcaagactccgtctttaaaaaaaaaaaaaaaaagaaaaattcagccgggcgcggtggctcacacctgtaatcccagcactttgggaggct[133 bp omitted]tgaggcaggagaatggcgtgaacccaggaggcagagtttgcagtgagctgagattgcaccactgcactccagcctgggcaacagagcgagactctgtctcaaaaaagtaaaaaaaaaataaaatagatgtatataaaatatataaataaatatatataaatatatatataaatatattttttcttttttttttggatggagttttgctcttgtagcccaggctgggtgcaatggcgtgatctcggctcactgcaacctctgtctctcgggttcaagcaattctcctgcctcagcctcccaagtagctgggactacaggcgcccgccaccacacccagctaatttttatatttttagtagagacggggtttcaccgt[138 bp omitted]tccttttagccccagataacattccattctcgatgtttatctgctcgcctgccgaaggacgttttggtggcttccagggctgggctgttatgaatagcagagctgcaggccgggggcggtggctcacgcctgtaatcccagcagttcaggaggccaaggtgggagggttgcttgaggccaggcaatcgagaccagcttgggcaacacagcaagaccccaatctctaaaaaacatacaaaaattagccaggcatgatggtgcacacctgtggtcccaatggttccagccactcaggaggctgaggtgggagaatcacttgagcccaggaggtcgaggctgcagtgggctatgactgcaccattgcacctcagcctggacaggaggacaagaccttgtctcaaaaaaaaattttttttttgagagggagtctcactctgtcacccagggtagagtgcaatggtgagatctcggctcactgcaacctccacctcccgggttcaagcgatcctcctgcttcagcctccagggtatctgggattacaggcgcctgccaccacgcccagctaatttttgtatttttagtagagatagggttttgccatgttggccaggctggtctcaaactcctgacctcaagtgatctgcctgcctcagcctctcaaagtgccgggattacaggcgtgagccaccatgc[134 bp omitted]tgtctctgctaaaaacacaaaaattagctgggcgtggtggcttgtgcctgtaatctcagctacttgggaggctgaggcaggagaagcgcttgaacccaggagccggaggttgcagtgagtcgagattgtgccactgtgctccagcctgggcaacagagcgagagttcgaatcaaaacaaacaaaaaaagccacaggcggccacacatagaccgtcactgacctcctggagcttctcttctcagggaaaggaacttccagactcagaaaactggggcaggaaacatccaggccagtttttccagcccaccggatctcaggcagcttccaggaggattgcctgaactcgctgaaattgcccaattccctcctgggcacatggttttcagatgatgaacacacaccctgcaccggggctgaggcctcaccctggcgtttgaatcctgggccccgggtttagtccacaggaggagaagccacactggctgctgggagggaatgggaagcgggcagccgccgtggaaaacatggatcagtgcttcagaaagccagacagcggcgccgtctaaccccaccgtgcggctccgaggaatccaccccagataaccgaacacagcggctctcaataaacatgttcacagcagcatgagccacgggagccaggggtggacggaaacagtggcacgagccacaggagccaggcgtggaaggaaacagtggcacgagttacgagagccaagcgtggaaggaaacagcagcatgattcacgggagccaggcatggacggagtccacaggagccaggcgtggaaggaaacagtggcacgattcacgggagccaggcgtggatggaaacggagaggagcagagagcaaggctctgacgccagccacagcgcagatgcaccctgaggatgtagggctcagacggatgcccgacacgaaaggccacacagcgtgtgatcccatttccatgaaatgtccagggccag[138 bp omitted]tggcgggcgcctgtagtcgcagctactcaggaggctgaggcaggagaatggtgtgaacccaggaggcgcagcttgcagtgagccgagatcgcgccactggattctagcctgggcgacagagcgagactccatctcagaaaaaaaaaaaagaaaagaaaagaaaaaggaaaaacagaattaagcattgtagtgaataattcagtgggatttggtgccttcacggtgctgtgctgctgtcacctctaattccaggatattcccatcatcctttgtggttggggcatcatctgtcactccccatcccctccccatccctgagaatccatgcatccccttcctgtctctgtggcttggtctgtctgtcctggacatttctttttttctttttgttgtt[137 bp omitted]tgcctcagcctcccgagtagctgggactacaggcgcccgccaccacacccggctaattttttgtatttttagtagagatggggtt[132 bp omitted]cttgctatgttgccacgctggaatttttttttttgaggtctctctgtgttgcccaggctggagtgcagcggcacgatcttgacccaccaaaacttctgcctccctgcttcaagcgattctcccacctcagcctctggagtagctgggattacaggtgcccgccaccacacccggctaattttgtatttttagtagagatggggtttcatcatgttggtcggggtggtcttgaactcctgacctcaagtgatccgcccgcctcgccctcccaaagtgctgggatgacaggcgtgagccaccgtgcccggctgcccacactggaattctatgttataggaacttcatctcactgaaagaaaaaggggactcctggatgggtcctgaatttagacatttatttgttcatgaaacaaacgctgatggggccgttgcacacccaggtctgcactggccgccctgtggggccccggaggggcgggggcagggagaggccgcctgagaggcagtggcccgggtggaggacccagggctgggcctggcgatgctccgactgcagcttccggagaacaatctcaggtccacaatgtggagacgttggcagatgctcctgctgaggaccgacagacatcatccccgcttcatcctgctttttcctcccatgaggaggtcaaagtcacaccgtggggccaggcccggtggctcatgcctgtaatctcagtactttgggaggccaaggtgggcagactgcctggacccaggagttcaagaccagcctgggcaacatggtgaaatcccatctctactaaaatacagaaaattagctgggcgtggctgggcatggtg[131 bp omitted]ggcgtggtggcaggcgcctgtggtcccagctactcaggaggctgaggcaggagaatggcctgaacccgagaggcggagtttgcagtgagctgagatcacgccactgcactccagcctgggcgaaagagtgaaactccgtctcaaaaaataaaaagaaaagaaaagaaaagaaaagaaaattaggccggtgtggtggcacacacctgtagtcccagctgctcgggaggctgaggcaagagaatcgcttgaacccgggaggcgagggttgcagtgagccgagatcgcgccactgcaagactccgtctcagaaaaacaaagtcgcacaggagagtcacgtccaccccctgggccaccggacagtcgccacagaccaggcagctgaatccccgctctacagacaaccccatcaaggctggggcagtgagacgctctgaaggccacaggcccccaggatcccaccccgtccgtctctccctccctgctgtccctctgtgagccacaccctgcggctgtcagcggcagtgatgggggctgcaggggctggggacagagggggatgagtttccagccaggcggcctgggagggtagctttaatccccacctcggttttgtcttagaagcagttgcatggctgtgctccaggccgtccagggttcaggctgagccaccgtctaggtctagacgtcagtgtccatcaggacctggcgtgccctgcaagcagacatgtgctccttcgacctccgtcaaccctggagatgaagcagggaaggggccctggctggaggcttggacatccatccggaggggcggagtggcctcgaggcggtgtgtgagtccccggggaagatgcaggggacgctgggtggccggtggcacgagtgaggctcggggtcccgcagccccccgtggtgtgggtgcctgagttggggggtcctcgaggaggacaagggagggaactgaagggggccaggacacccggtagcttggctgccgggggctctgtgatatgctaagtccctcctgctcaccactaaacccaagaggaaaaggaattcctggcagagtccaatttaaagtcaacaaacaaacaatgtgggaaggagagaaggaatcccaggaatgtgggcgaggtcctcctcccgccggggccaccctggacccggcgagaaatcgaaggtcccccaaggacccacgtccaggagccaacagcctctctgtgcaaaccagacaaccctgcaggaactgtgcttgaagaaaccgtggaaactgcccccaaccctcccgtctctatttctttctctgttttattatctcattcttggctgtgaggtaaacaggagaaaatgagaaggtggttctggaggacccgaccgaatttgctttcgtgacagggtcaagcgccctttcctcgccggccgcagccctcaccaaaggggatttgggggcctccggacaggggtcctgaaggttttgaattgttcaatctctgggggtacaggaacccctgcaggaggtttcaaaggcaagagtttcgcagagagaaaaaaaccatgaactttgcaggttggtggcggaatctggtgatttaagaaaacgtgtttaagcctcggccgggccgcgcctgggctgtctgcggtgctcttccggaattctctacaatatctggaagtgaccaagaaaattccagaacccggaggctgcgccgtggagataaacatgggcacctgggtatgtttgtttttattgttaggacctattttatcacaagcaaaaaaaaggaagctgcccagaaatccaggggtgatggatagaaggcgatggggcctgcagtggcccaacggattctagaattttcctctaggaagatgcccgggaattttaaccctgttggctcgacccagaagctcggggtggcagggaaaggatcactgtggccttccttccttccttccttccttcctggaatttcgctctgttgcccaggctggagcgcagtgacgtaatcatagtttgctgcggccctgaccccaatggcacaaatgagcctcctgcctcaatctcctaagtagctgggactacaggcatatgccactacgcccggctaaattttttttttttttttttttgagacagagtttccctcttgtcgcccaggctggagtgcagtgtcgcaacttcggctcaccacaacctccgcctcccaggtggaagcgattctcctgcctcagcctcccaagtagctgggattacaggcatgagccaccacgtctggctaatttttgcatttttagtagagacggggttt[141 bp omitted]ctgtgtcacccaggctggagtgcagtggcaagatcacatcccactgcagcctcgacctcctgggctcaagtgatcctcctgcctcagcctcctgagtagctgggaccacaggcatacgccagcacgcccagctaattaaaaaaaaaaaaaaaaaactttagcagccaggcacggtggctcactcttgtaatcccagcaatttgggaagctgaggcggacagatcactagaggtcaggagtttgagactatccctgtctctactaaaaatacaaaaattagccaggtgtggtggcgcacatgtaatcccagctactccggaggctgaggcaggacaatcacttgaacccgggaagcagaggttgcagtgaggtgagatcgtgcccctgggcgacagagggagaatccatctcaaaaaaaaaaaaaaaaaatttccggatggggtctcgccacgttgcccaggctggtcttgaactcctgagctcaagtgattctctcacctcgacatcccaggttggtggattacaggcgtgagccacagtgcctggccctggcttttcttcttgtttgtcaggctctgctgttgtgataggaaggcttgaggacttcaaaggggcggctggtgtgcggggttggggacgatggcagggacaggagggaggtgctgttggcatgtgtggaatgtggcattggcgctggatggacgggtctgtgtgcgctgactgcgtgtccgatgccagggcctgtgttccccctgcacgtccccaggaaggaactgctggaccagcagaatgaggggccaacgccaggggcagcactgcccggccacagaggactgtggccccacagatgacaccctcagctaccagctcctgcatctggaagatgaccaggaggaggaaggacggtctgcaagtgttcaaagtgatgtttccaggccgggcgcgcttgtaataccagcatttgggaggctgaggcaggcggatcacctgaggtcgggagttcgagaccagcctgaccaacgtggagaaaccccgtctctactaaaaatacaaaattagccaggcgtggtggcgcagctactcgggaggctgaggcaggagaatcgcttgaacccgggaggcggaggttgcggtgagctgagattgtgccattgcactccagcctgggcaacaagagtgaaactccgtctgaaaaaaaaaaaacctctataacatccaaaatactaaccacttgttacctctagattgtttggggatgttagatttctcctttgttgccagctcttttatttttatttatttatttattattattattattattattattattattattattttgagatggagtcttgttctgttgcccaggatggagtgcagtggtgtgatctcggctcactgcaacctccgcctcctgggtttgagcaattctcctgcctcagcctcccgagtagctgggactacacgcgtgtgccaccacgccaggctaatttttgtatttttagtagagacggggttttgccatgttggccaggatggtcaggaactccccaactcttatttttaaatgttgggccacacaagtctgggaaatgttagttttcaaacacatcagggaataaatggatacaaaagtcttgaggaccacttaagaaatgaacaatagcagatgtgtaacagttatactacgctgctaccttgtaaaacattttagaaacatctgtttccagccgggcctggtggctcacgcctgtgataccagcactttgggaggctgaggtgggcagatcatgaggtcaggagttcgagaccagcctggccaacctagtgaaccctcatctctactaaaactacaaaaaattagccaggtgtggtggcgggcgcctgtaatcccagctacttgggaggctgaggcaggagaatcgcttgaacctgggaggcggaggttgcagtgagccaagattgcaccactgctctccagcctggcaacaaaggaagactccatctcaaaaaaaaaaaagaataaaaagaatacaaaaagaaaaaaaaaacatctgtatcatccttgtagattctggggtttggaaacaggctttgaaaaaagtcctgaaacaggccgggcgccgtg[319 bp omitted]aatggagcaaattttgaacagcttgaatacctgagacaggccaggggtgcggggcaggctcattttatattcttcacggttgtgtgaatttcttgcaattatatgtagcaattttttcaccaggatttagtatattagcatgtttcgggctgggcacggtggctcacgcctgtaatcccaacactttgggaggccgaggcaggtggatcactaggtcaggagtttgagaccatcctggccaacatggagacacctcatctctactaaaaatacaaaaattatctgggcgtggcggtgggcgcctgtaatcccagctacttgtgaggctgaagcaggagaatcgcttgaactcgggaagcggaggttgcagtgagctgaaatcgcaccactgcactccagcctgggcaacagggcgagattccgtctcaaaaaaaaaagaagcatgtttcctagcaagccaattcagaataaaaagaaaacaaaggagaaaatataatcccaataaaatatattgaaataaatatgtacacacatatatatatgtgagtttatgctttgttttgttttgttttctggaagacggagtctcgctctgtcacccagactggagtgcaatggcgtgatctcagctcactgcaacctctgcctccctggttcaagggattctcttg[134 bp omitted]ctgctatttatttattctgggttttttttattcttttttgttgttgttttcattttatctttcttttcctatttatttagagacagggtttcgccatgttgcccaggctggtctgaactcccggactcaagccatctgcccatgccggcctcccagtgtgctgggattacaggaggaagccactgtgaccagcctgaaagtgttcatttttaaatttttaatagagatggggtctcactatgtcacccaggctggtccgaaactcctgggctcaaaccatccgcccacctcggcctcccaaagtgctgggatcacaggtgggagccacgcgcccggccccaaagccctccttgcacaagcacctgagccgccatggcccacaggcccatcaaaaccagagcaaactggtacctgtgatacagcctccactccagccccagggcccagccccaggccacccgagccggctgtgggtgacctgagaccaagtgtcgtttcctgctataaactattgatgcctgagcagtcacctccaggagctccgggcttggctacggtgtcctgggttccctgtaatgaagcccggggcagctgcggcctggagggcgtctgctccgcctccatcctgggcccgcctggggctcttttccttctaggcctggttccctccaaaattagcttcctatcgggatcccacatcccctcacaatggaggcctgacctctggggagacacaatgtcagggtcactgtgaggtttttatttatgtacttttatttttatttatttgataccgagtctcactgtgttgtccaggctggactgcattagtgtgatcctggctcactgcaacctctgcctctcgggctcaagcgattctcctgcctc[135 bp omitted]agcctcccaaagtgctgggatgacaggcgtgaaccaccgcgcccggcctcgatttactcattttttttgagagagagagagagtctcactctgtcacccaggctggagtgcagtggcgtgatctcagctcactgcaacctccgcctcttgggttcaaataataattctcctgcctcagcctcccgagtagctgggattacatgtgtatgctaccacacccagctaatttttatatctttggtagagacaggcttttgccctgttggccaggctggtctcgaactcctgacctcagggcatccacccgcctcagtcacccaacgtgctgggatcacaggcgtgagccaccgcgcctggcctgactttattattgttttacaaagagcagaccttccacctgccatggataaaacgccgagttctagaggacactggagacagagtgttccccagaacaaggcctgggcgcagcagcctgcagggctggggtctccactcccgggggagcgtgcagcggggcctgccatccctctgtgcccccgccccacccccactctgcaggccgctgaccctgtggtcgggctggtgagcagatggctgctggatcactgacagcccggctcacgttccctctccctatggagacatcttccttttaataaattttgcaaggccgtggaggggggccagcgctctggcccacgtctgtctcccatccccatcaccacacgaggccccagcacgcctggctggcctaagtccccgcaggatgaatgggcttccggggcctgctgggaccaggtaagcaggctgtgcggcttaaaacaacacaaatacactctcgtctctggaggccggaagtctgaagtgaaggtgtgcaaggtgccaggcgagtaccctcccggcctcttccagctcctggtgccgacagccacctctgaccctcctggacttgcggccgcttccctcccaattctgcctctgctgccccacggcggtctcctctgcatctgtgtccaaatttcccttgtctcccgaagtcgcctgtcactgcggtggtgcccgccctaatgatctcatcctaactaattacatctgcagaaaccctatttccacataaggtcccatttgtaggtgcctggggttcacgcaaagacagatctttgagggaactcaattcaccccaccccggggagtttgcctttgtggccggcccttccccctcagatcaaattctgcctcctcagcgaggccttcctgaccctcccgggcccttcctgcctttctctctggctgcggctgtttcctgcggggctggctgcagctcccggcggcgccctgtcctgtacctgtttcatgtccatcgtcggcaacccctggcttctaacacagctcattgcccgcaggacctcccagcaggagcagggacccagtaggccctgcgtctccgtccgaaccacaagctgctgtgggtggtcacttgacagaaagacccctgcccccccttccttatttgtttatttgctttttctgttgctttagagactggattttgccctgtcatccaggctggagtgcagtggcgaaatctcggttcactgcagcctccatctcctgggctctggtgagactacggccttagcctcctgaatagctgagaccacaggcgtgcaccaccacgcccagctgattctttgacttttgtttatacagggttttgccatgttgcccagggtggtttcaaagtcctggcctcaagcaatcctcgtgcctcgccctcccgaagtgatgggattataggcatgaacaactacccacttcactccatcctttcctttttttttttttttgagacagagtcttactctgtcaccaggctggagtgcaatggtgcgatctcagctcactgcaacctccgcctcccaggttcaagcgattctcctgcctcagcctcccgagtagctgggattacaggcatgcaccaccacacctggctaattttgtatttttagtagagaaagggtttcaccatgttggtcaggctggtcttgaactcccgacctcaggtgatccacccacctcagcctcccaaactgctgggattacaggcatgagccaccacacccggccgagacagggttttcaggcgatctgcctgcctcgggctcccgaagtgctaggattacaggcgtgagccactgggcctggctttatttaattttttgagatgggatctcactctgtggcccaggatggagtgcagtggtgggatcccagctaactacagccttgaactcctggcctcaagggatcctcccgcctgggtttcccaaagggctgggaatgacaggtgtgagcccccacccccctggcctggatatttcatagaaatgggatcacacggggccaggcgcggtggctcacgcctgtcatcctagcactttgggaggccgaggcgggcggatcacctgaggtcaggagtttgagaccagcctggccaacatggtgaaaccccatctctactaaaaatacaaaaattagctgggcttggtggtgggtgcctgcaatctcagctccttgggactctgaggcaggagaattgattgaaccaggaggcagaggttgcagtgaactgagatcgtgccattgcactccagcctgggcagcaagagccaaactctgtctcgaaaaaataaaataaatgggatcacacgctgtgtgtccttctgtgtctggcgtctctcacggagcgtgacgtccttaaggtgcatccgcgctgtggcctgggtcagagcctggatccttttcacgctgagttgtgttccgcggtggacggccggcactgggttggtcttttcttccactaacgggaatttgggctgtttccacatgtggcctccgtgaataacactacgatgaacgttcatgtacgcgtttctgtgtggacttgtgtttccccttctctcaggggcatgaataggaggagaattgcggggttcctgagggccggcccccagtgctggcacatccccaagccaagccccacccctcttttttttttttgagacagagtcttgctccgtcacccatgctagagtgcaatggccccatctcggctcactgcaacctccgcctcctgagttcaagcaattctcctgcctcagtctcccgaggagctgaggttacaggcacccaccaccatgcccagataatttttgtttttttagtgggagacggggtttccccatgttggccaggctgatcttgaactcctgatctcagggatccacgcacctcagcaccctctttggaagttcctagcaagttctctgcctgagttcagacccacagggcctcttaggggacgggggagggtcagggcccagctctagctgaactcccccggggggaggggggaggggggaggctcaggacccagctctaggggggattgaggaggatcagggcccagctctagctgaactcccctgggggtagggaggagggtcagggcccagctccagctgaactcccctgggtggggtggggaaagagggtcaggctggggaggggagcacagaatggcggggtgccaggcctgggggagaggcggatggggtggggaaggatgggtctgggcagataacgctgtggccttttcctgttggcctgagggcccagggtgggggtggggagaggctggtctccctgaggtctgggcatagggaggtgtcctgggatgagaagactcttgagaagtgactttgataattcgggggcagatccttgggcccaccaccccttgcagggacaggggtccttcttggggtgggggatgaacagagactggagagggtgggggagaaaggagttgaggggctaatttacaggacctctcaggccgggtgtggcagctcacacctgtcatcccagcacactgggcagctgaggcaggaggaccccttgagcccaggagtttgagaccagcctgggtaacacggtgagattctgtgtctacaaaacattttttaaaatgagccaggcgtggtggaactacttgcttatagccccagctaccgagaggctgaggcgggaggatcacctgagctggggaggttggggctgtggggagccgagactgtgcctctgcactccagcctgggcaacagagtgagaccctgcctcaaaaaaataaataaacaaaaaataaataaagcccccattccctttaggatctctacttcctataccaacccactgtcccagcttggaggggcgggaccagcctcgagccgcagttgattcccagagcacagagcacaggacggaagtggttctgcatggggtatagtgaggccagggaatagcaatgcattcctgtccgtgagtcctggccatcaggccttggggtggcctcaccgaacccccactccaagctccgttcaacagaaatccaggaaatgggccggagaggctgggagaccacccaggagaccagcccgaggccgcgccctggatccctgagccctcacttttgtaattaagataataaacctgtgctggctgtgcgggcacacacctgtcatcccagcactttgggagaccaaggcgggcagatcacctgaggtcaggagttcgagaccagcctggccaacacagtgaaaccccatctctactaaaaatacaaaaattaggctgggtgtggtggctcacaggtggattacagggtggcctgtaatcccagcactttgggaggccaaggagggcagatcacaaggtcaagagatcgagaccatcctggccaacatgctgaaaccccgtctctattaaaagtataaaaattagctgggcatggtggtgggcgcctgtagtcccagctactcgggaggctgaggcaggagactcgcttgaacccaggaggcggaggttgcagtgagctgagatcacgccattgcactccagcctgggcgacagagcgagacgccgtctcagaaaaagaaaaaaataaatcaaataaaaaaataagaataaaaatacaaaaattagctaggcgtggtggcaggcacctgtaatcccaactactcaggaggctgacgcagaagaatcacttgaacccgggaggcagaggttgcagtgagccaagattgcgccactgtactccagcctgggcaatagagtgaggttccatcccccccaaaaaaaaaacaaaaaaaaaggaaaaggaaaaataaatctatggaactgctcatggggaggagggacggcctggccctgccactcatgttgacgaagaagtaaactgaggcacggcccttccctcccccatcagaactgaaaggtgtctgaggccccagcaggccctctgcatgagattcggtggctctgagggcctcagatgtcctcactcccccccccgtttctcctgccaggctcagagtatcattttcaaaatggtaaccagcaaaccaacgtgattctcgcacaaaggcaaggtgagcctgttcctcgctcaccctgaatcattcatgaaggaggcagctggcctgcgggctgggatgggagacaggagaggagaaaagacagaggctgggccctgctcgctaaataaatcaggtgcccacgggagcccctgggcgtcttcccgcgctggcgttctgcatatgacagctgacctgtaaattgctgggccctcagccatggttactgtcaggccagcccaggaaggacactggtttcaggtgacctgggtgaggtggaggcggtggggggggttcctgggaccaggccgccattgcaaaaacaaacggcctgcttgtacctgctatcgccctctaagcttcaggtggtgggtggggctgaggggctgagaggtggccccaaagaaagacaaccacatcctaaaccctggaacccgtgaacaaggcttcatttggaacaccagtctttgaaggtaccattaagtgtcttgagatgagatcatcctggagtctgcaggtagaccctaaattccgcgacatacattttattttttatttttacttttttttttgagatagcgtgtcactctgttgcccaggctggagtacagtggcgtaatctaggctcactgcaacctccgcctcccgcgttcaagtgattctcccgcctcagtctcccgagtagctgggattacaggagcaaaccaccacgcccggcaaatttttgtatttttagtggaaacgggctttcaccatgttggccaggatagtctcaggctcttcaccttgtgatccgcctgcctcggccttccaaagtgctgggatgacaggtgtttattttcgtttttgttttttagagacagagtttcactcctgttgcccaggctggagtgcaatggcgcaatctcggctcactgcaacctccgcctcccgggttcaagtgattctcttgcctcagcctcccaaggagctgggattatagggcatgcaccaccacgcctggctaatttttgtatttttggtggagaggaggtttctccatgttggccaggctggtctcgaactctgacctcaggtgatccactcacctcggcctgccagagtgctgggattacaggtgtgagccattgcacccggccagacactgtcttaaaaaaataaaaataaaaaaaggtactggacaggtggctggtcatgtggggcttgcggggtaagggatggccttgggtttatactttgagcaagacaggaggcctggcggggccacgatcagaagtgggttttaacacgattccgaagggttagactggtgcttggaacctggtggtctctactgctgccagctgccactcagacccccggccgcccctgcctgtctgctttcagggcggggcccatcccaggcactccgcgaacagacagaagcggctggttctggtggtgtgaggatgggggtctccaggggagcaaatccacagtaacacactgggcttctcccagatccaccggacattcctgatgagtgaccctggctgcagatggctcttggtgagtctccgttgaccgggtggttcgggccaaaggaccttgccgtgcgatgcctccatggagctcggcggccacccctaatccgggctggaatcctctggcaccagacgcccggcggggctccaaggctcctgggcccacgccaggccccggcctgaaacgcagcactgctggaataaaacacgccagagaagcagggcgctaggctcgcctggatttggggaaacgagaattgtcatgtcttctccctccgtaggttggtgttaatgaaaaacccccttttcagcatggactaaatcccgctaattctatttagggagcagtgtctactccgggccgggaactgctccggtttccaaccgcagcctcccgtgagggtcccagtgtggagggccggggtcatcccctcactctgggatggctcccaacccgctgacctggcctccccgtcaggcaccctcacagctctgtcagactcttcatgtgatcagcgctcctgggaacattagtttagggtgttttctgctgctgggatggtggcccgggagggaccctcctggtgaccctgctgggcctggccctcagtttccccagccgtaggctggcagcctcgaactgtacgagctccaggccacagtttccccagctgtaggtcagtgggccagggactgtagggggctcgggcctcagtttccccagctgtaggcgggtggcttgggcctcagtttccccacctgtaggcgggcggccttggattgtatggagcccgggcctcagtttctccagctgtaggcggatggccgtggactgtgtgtggcctgggcctcagtttcccccgctgtaggcagatggccgtggactgtgtgtggctttggcctcagtttccccagctgtaggcggatggccgtggactgtgtgtggcccggacctcagcttccccagctttaggcggttggccgcggactgtgcaaagtccaggcctcagtttccccagctgtaagcgggcggccgcccactgtacaaggtccaggcctcagtttccccagctgtaggtgagaggccgcggactgtacaaggtccaggcctcagtttccccagctgtaggcgggcggccaaggactgcaaggtccaggcctcagtttccccacctgtaggcgggcggccgcggactgtacaaggtccaggcctcagtttccccagctgtaggtgagaggccgcggactgtacaaggtccaggcctcagtttccccagctgtaggcgggcggccgcctactgtataaggtccaggcctcagtttccccagctgtaggcgggcggccgcggactgtacaaggtccaggcctcagttttcccagctgtaggcagccggccgcggactgtgcggggcccggacctcagtttccctatctccgcagtcgggattcgctgttccggggcgaacaaagaacggtcgggggtgaccccggatcatggcgcgcccgcagtatctgtggccactgtggaaacagccctggcgtgtccgggacgcgacgcggcctttccctccccgcgcgatcacccagatgtgagcgctcagtttgaatcggactttttggccatgtgcccacaaccaacatggagccctgagggtttcctgcccgactccaagatggcgatgcgactccctttgccctcacggcccaggcgggcgggtcctgcccacttgcaagatggcggcagcctgggcaaagcacgcttcccgccgcctgactcgccacgtacccactctcaagatggcgtctcccgcaaagccacgcgccagctgactggctcagacgccgtcacgtgatcccattttctccccctcccccgactacacaagccgtttccgccttcggccttgaggaataaccgcctcccccaataggcgcctgcgatttctctgggtcccgcccccgggcggccttctggccagtgggaggtgctggcgggggcccgcggggctctccccgccccctggctgcagcgggagccaatgggcagcgcgcgcgggggacgtgtgcgggcgtctccgccattttgtgagtctataactcggagccgttgggtcggttcctgctattccggcgcctccactccgtcccccgcgggtctgctctgtgtgccatggacgggtgagtcgcacgtcgccccgcgccccaccgccctccccgcgccgcagccctgcccccgccgccgcgccggcctccccggggccgatctcgccccctctcgggcgggagggggcggcgggctctccccttcctctccgcgtggcgggcgcgggtgcggggcgggtcaggggcttcccgggggtctggccgcgtccccatcccccgtccggcccgcttccggcccccgcgcgccccgtccctagcgcacgcggcctcccgcgcccctccccctccgcgcgcgtccccgcacttcgcctttgccccgcctcggcggcgcgcggcccttcccgcttcccgtccggccctcgcgcgcccggatggcccttcccgcctcccgtccgctcccctcgtgcgcctgcgtagcccgtcgcgcgtccccgttggccccagcgcgcgtgcgcggccgccatcgggggcgcgcgcctttcccgccgcccggactctgcccccggcgcagccccggaagcgcaggcggggctggggcggccgccgggagggaaagctggcgccggggcctcgccgcgggcccgagtctctgcgctccccgccctacccctgccccccgtgcgccccgggccgcggccaaggggtttcggtgatctcgggagagaagcggccgccccgagggtctgtcctccgccccggggccggaggggcctctccagggacccccgcgggcgccgtcatggggaggggccttcccggctctcgggccggggcagcctttccgggcggctttgctgggcgggcttcccttgggagaggtgggagccccctccagaaaggccgtgtcccgccgagcgcttcctgcgcgaggccctccctgggaataggaagcgggagaggctggagatgtttcgcattctttccgttttcctgagaagtttttcttgggttcagtcacttttaaaagtctgttaaacgtggtccgtgcagtctgtggtgtcagaagaggcgcagccctagagtgggtctggaccccttagcatgcgtgcgggcaggtgggtcctgcagacggcgagacgagggctccccgctctcggacccagcaccgcgggctcgggggccgcgcactcgcctcccggagtgaggcaggaggcccggaggctgcccttccgacggacgctccgagtcacttagggcctcgccgggagttgcagtggccgggagaagccgtggggagctcactgttgggtcaggacctggccggggctgaagggagggcctcggacagtccggctttctatccaccttccccccggggtgtcccgaggagggagagtcgggtcgggcggggctcgggttgatcagtaactgaggctgtgttctggtcggtctgttaatttttattgacggtttccacggccgcctcctgctctcctcggtggatcgggctccactctgctgagaggcaccctcttgggggcccacccctacccgggtggaagctctggcccaggcctgtgagtttgccagtttcagcctctccgaggcgtttccaacttactggaaagcacacagcagcccttgaaccctctcagcggcatctagcattcctcggggcttccgatgggggtgtctttgtcttggaacgtgtggggcctggtccagaggtggggcctggggtcctgctgggagggaggggcgccaaaggacaatggtggccccttttcaagttgcagtcaagtggacggctcacttccctgcccttctgagctttctctagcggggcctcgtgcagccagagggagccctgcggaggtggcagctgcagggacctacgggctctcctggcccggggacagctgggtgctcctgctgctgagtggccaccaggctaacgttgtctcctttctttctctctacagcattgtcccagatatagccgttggtacaaaggtaggcacttctcactttgcttctccgtgacgctcctctgaccttgtgccgaccccgggggccaccccccagcgctgttgcgttggctagagggcgcttttccattcctaaggggcactacccttggtctggaatctggagttgggcggtagggtttgaaccccgggctccagtgcccgtgagttttgggggcttgggtttgctggccgcccctcaggtctggaatctgagctgctcttcggttcttgctgtcagcagcgagggctctgtgtgccccaggcctgcctttggaacttctgcctctagaggctggaatcgtgccgttcagtgggaaacctcatgttgtggctgcctgggagactcttggttttgataggaaaagagccacctggctgtggaggggacctggatagaatccagcctatttgagtggctaggatgggcatttactggttgattttgacgttaagtttttttgtttttgtttttgttttttatttttgagatggagtcttgctttgtcaccaggctggagtgcagtggtgtgatcttggctcactgcaacctccacctctcaggttcaagcgattctcctgcctcaacctcctgagtagccgggattacaggtgcccaccaccatgcccagctaatttttgtattttttttttttttttttggtaaagatggggtttcgaacattgttggccaggctggtctggaacacaggtgatgcaccccccttggcctcccacagtgctgggattacagttgtgagccgccagacccggctgacattaagtatctttgatggcatctggttagaacagcagcaaactgtcaaaggtggtgtttggggcaagagaaaaatgaatgtgccacgtctctggggtgtgcgaatcttgcagccccatggagggtgaggccagggctcagcatgtgaggaaagggggtcagaacctggagaagaagaaggtcctggggaggcgattctcgagggagctgtagtcctcgcttagctggggtagttggttaatgattctgctggtcattgtgggttgagggggctcccgacttcagggcttgtgccccgagagcctcccgcagggcgagcccacagtggtggcgtcctgagccagcagccagttggtttctggtcagtcagcagtggtgcctgggccaggtttcggtttttcccaagtggactgctgtctttacgcgctgcctgccccgatcttcctggagataaaacctgtttgttcagtgtgggaggagggagaggtactttcatctgaagcatttgcaacaatccctagatgtgtctggcttgcaggcagtcgtctcttccctgcttctgtgggcctgctttccagctggagtggccctcagcttccatcgggtggtccttgagccctcctctgcagttcctagggggctcctgggctgggacgttgaagcccagccaggacttgaagcctgcgggagggattttgccacagggcagggttagggctcctgctgggtgcaggccctggtaggaggacggggtagtaccctgacccagatgataccccccctcccccccaccaccagggagccctcagctgacctgggcccacacctggctacgctgtcctttagcccaggacagagcaagctcttgttcagtgtggggttaaagacacctaggaactgtgctgtagggccccagctgcagactggaagtcctggggcgtttcctgtcaatctgtgtgcttcaggacaggtgccctgaagggaccctcctggggtacctggcagctgctgtgaaggcagtggaggcgctaggcccagctcgtgtctcctggttgctgccctgtggagcctcggagcctccaggtgtcccttccgttctgctggggcgccgttgagctgagccaagccggcctgtgccgcctgggcaggcatggagtttgctgccgcagacagttgtgggcaatgccaggccacttgcccatgggaatgagattagggcttcaggcaggcggccaagaggaccgctcagaggaagcggccccgcccaccactccagtcaaagacagggtccaagatgccctttttaaggtttgtgcagccagcacatgggagccgcatgggcgcttggccactctccagcttgggggaggaccagccctggtgtcctggacggggtcggctcctgggctcccccagcctctgagctggaggggagagcagacaggaagcgacttcctgtgggaggcgaaggttggaggccctgcgtctcaggtgcacccatcctcccttcctcccgtcctcccttcctccggtcctggcactgctgtgttttctgatcgcgtggtttccacctgaggcggctggctctgacccctttcccctgggcctgcgcagccccgccttgtgctcatagggggccccagactctgaaagcgagaggactcgagggtctgttttcagtatttggcttcatctgtgtccggccggaacctcagggccgccgtgacactggacactgttcattctctgaccctaaagtcttggggactgaacaggtgccatttgggtgggcgccgggcctgtggaccctgagtgattcctggttccggcccttgtggctgctcgattgcttgtttggtgacgccctgagtgcttgtgggattggtgggagactcagggctgcagttagaggtctcattggcaagggccagtccctgttccccatcctccttgagcaggtgccggagtctcccgaggctcttgccgtccgcgtcgggaggaggcagctgtggggctttggaggctcgggcagtcttccttccaggaagctcttgagccagggccagggcaggagtggagctgaacgtgggtggaggggaggcggccttaagagaagaccaagcgcaggctcggggaggccagcgttggtgggggctctttggccaggtgtgggggcagctccttgaccaggcatgggggtgtgtggagctgggggttgtctgaggggggacagggtgtgatatccactggttctttctgatgcgatggccctgggcccttcagcaggtgggggcaggctcttggcctcaatcctgatacgggagatggaggctcctttgttccctgggatggccctgtcctggggggcctgggcgttgctgccctcagcgcctgcagaggctcgctttgcagaccaagcgcctgtgctccaaggtcctcagacccgagctttgttttctgtgtaactaagggccgtaaccaacgtctcctccaatttcactctttgaataaacgtgtgtcttcaatccttgcagcgggggggatgtctgccgtcctgagcctaggatcagtctagtgcaattcttagaagttgatccaattacatagaaataaccagtgaatagattgtttctggagagaaaatggacaggtcagaagtgatggagccgctgtggagctcccccggccctagtcacggccgcgataccagcggatcactgggcgggaggccgtgtctctagtcctcagtctcgcgtgtgcagagacggaggtcgggtttcttttccgggctggaaaacaggagaggaggggctcctgcgagagtgagggaggcagcgctataatttggttctcttgcgaggccaccagaagtgaggacggctgcctgggccctgccgtgtgctgctgggggggctggctccatggagggggtcctctgccctgctggctggtggctgaggccccaggcctgtgcccagggccgctggcagcacagtgaggccacgtccacagcagagttggccgtggagatagtgtacgtggtgccctccgtagctgagagcctcccagccccacactggctgagtacccagggcttccagaatttggaaaaaggagcagtgttttggtcgtggagctgtggggtgccgtgcgcgtccatgggctgggtctgcgctcaggctgccctgccgtggaagtgtgggtgtgggtatgggttgggggtctgggaccccaggcagcccaagtgggagcagggccggccggtggggaagggaggctctggcctggtgggaagtgcagctccgcgttgtcccttctcttgcagcggggatctgacgagcttttctctacttgtgtcactaacggaccgtttatcatgagcagcaactcggcttctgcaggtaaggccgggactcggcccagggcaagacccgtgggtgtctttccctggaacaacgttacgttcttgttctgggactctactttccatctccaactgcaggggcccatggtccacgctacagacccaggtccaagttctcgctgcagagaatttccagggaggcgctggatggatggtccaggctggcacttggacctgtgggcgggttgtcaggagctgtcgggagcaggggtcctgactgtgcaggtcttggcctctcgcgctgctggttcacatgcaccctcctggggctcagggttggtctccgtagcaggcagggctctagggggatagcagggaccttcctctgtgggctcctgcgagttggtgcctgcatctcatggcacccccttttcagcaaacggaaatgacagcaagaagttcaaaggtgacagccgaagtgcaggcgtcccctctagagtgatccacatccggaagctccccatcgacgtcacggagggggaagtcatctccctggggctgccctttgggaaggtcaccaacctcctgatgctgaaggggaaaaaccaggtacctgagccgcgtttctccggggtgctcacaccgtgcaggcggggacgaggagggcccagcgctcactgcctccccaacaggccttcatcgagatgaacacggaggaggctgccaacaccatggtgaactactacacctcggtgacccctgtgctgcgcggccagcccatctacatccagttctccaaccacaaggagctgaagaccgacagctctcccaaccaggcggtgcgtggccccgcggcggaccccagcagcccggggacctcgggggtgggcccagccgcaggggccggggactcacggctgtgcctcccacagcgggcccaggcggccctgcaggcggtgaactcggtccagtcggggaacctggccttggctgcctcggcggcggccgtggacgcagggatggcgatggccgggcagagccccgtgctcaggatcatcgtggagaacctcttctaccctgtgaccctggatgtgctgcaccaggtgaggtggtcccatcaccgccagggcaggtcggctgctattgctgtgggcacaggcacacgggaggggcctggcagggctggtgggcaccgggcaggagctcatgctgtggcccgggacctgcagattttctccaagttcggcacagtgttgaagatcatcaccttcaccaagaacaaccagttccaggccctgctgcagtatgcggaccccgtgagcgcccagcacgccaagctggtgagtggggctcccgggacggcgcccgccctggccctggcccggcgacgtctcacggtccctctcccctcagtcgctggacgggcagaacatctacaacgcctgctgcacgctgcgcatcgacttttccaagctcaccagcctcaacgtcaagtacaacaatgacaagagccgtgactacacacgcccagacctgccttccggggacagccagccctcgctggaccagaccatggccgcggccttcggtaagaggctgcccgacgcggcgccagtgtgcagagtggtctattagggccgctcagtccggagccccggcggcacgggcccggccctgcaccagggtgatgcacctgctgctctctgcacggccagcacagcacggtccagtgtcccccacgtcgggaccacggccccccctggagcagcggatctgcccgcgaaggctctgccggggccgcccgccggccgggttggggcccatcccgcagcacagcgcccgctcgcggtggaggttgtgggtgcgatgattagtgtctcatttatttctaggtgcacctggtataatctcagcctctccgtatgcaggagctggtttccctcccacctttgccattcctcaagctgcaggtattcaaacgcttggtcttggttccccagcgactgcatgcccacaccaccttcccaggcagctccgcatccacggcggcagcctgggcggactgggcactcgagtgccaggtcaggggcccttcccgggagaggggacgccacgtccacagagcaggcttggccagggcagtggtaggacagggctgtggaggcccacgtgtggacggcgccagccagaagccgctaatcgcacagtctttgtggtctggttcccttcaagcacctccgggcgagcgcgaggaccgccagtggttggagggatgtctctagtagttgaatttgagtggcctggtaagcgcgcggcccgaggctgagcagcatgaccggcggcgggacgtgtgtgcgtggccgtcctcccgcttcccttctgggaccggggcccggccgccccagtgctggccgtggacggagcagcgcgtgccgcccggcggccgcctcgtctgcatggaggcatgggcgcgcatgcgcggtggtcccgggacgggccctgcttgccgagggccccgtgtctgtgctggcggagccggagcttttctgtgctgtgggcggggcgcatgcagatgagcccaggcccggcccggcccgtgctgtgaggagaggcgggcgctggtgcaggagccggcgggtggctgtgcgggggtcggacgaccccacaggcacccagggtagggccagagccagggccgcctcccgcgcggctcggctcctcggtgcatgaggacggggagcgtcggcctctcccactctgcggtggagtcgggggcgccgccgctcatctcacctcctgcttttccaggcctttccgttccgaacgtccacggcgccctggcccccctggccatcccctcggcggcggcggcagctgcggcggcaggtcggatcgccatcccgggcctggcgggggcaggaaattctgtattgctggtcagcaacctcaacccagaggtacgtgggcttttcctccgcgccgccgttcctcccggaagagcgagcaggggatgttgtgctcgggctcgggtcccggagcagcgccgcccctcgctgtgtctgcgcctctgccctggcagcccctctgctgcagcgctgagaccctccttttccaagatggcttgagttttcctcttttcctgaattcacatcttggttcgcgttttctcttgcatgatacgcagaatgaattattttttggttacccaaaggcaatctaaaaattacttggagctgagcagggcgcgcagttcagagccccagcaggccgccctgctggtcagcgggacacacagggttagcgcggcggggtgtgggcagcccctgtggctcgagagcctgtcacttaactggtggatccgttatttcccagaatggttaaattcccctcggggagagcttgggtgaaacaagaggcccaaaatatgtaactcttgatggatgggatcctcctggaatcagcatttcaggctgttctgtttcccggcaactcctgtgacttcctcaaggcggtgcccagcctggccctccctcgcgggggcccaggacgcactccctgcctgtgcctcttaccacgagccgggtgctgtccctccagctcctcctgagcgaggccgtgcactaacagactcgatctcccttcacgcctgtaatcgtccttagagactgacttgtgccacagctgcgggagacagcgctgctgcagggcttggctgaggtggccgcgagcggagctgcacgcgcgctcctggggggcgtggttgggatcggcttctgggagcccctccagcagcgctgtctctgccggcatgtgagtgaaggtgcttctcttaccgtgtgcccgtcgaggtaaacctgtaactggaatgtgtgtggagtgtgactgatagaacactacctgattcttatgtatttactgacctgtgtttttttgctactttttttcttttctccccttcccctttccctattttttttcttgccctgatccggaatttctttgccaactgactgcacggtacttctgcttcctgttgttgcttgaaacaaaacaaaaacataaacaaataaaaaacaaaaattccccctcaaaccctgctctccggaaaccaacctgcccttgaatattaacatcctgacaacttcatcatccatcaaccactgcacgcctgcggggactgtcttcctcgtgtggacgattggcaactcgccccccttgacctctccctctcccctgtccctccgctgccttgctctgctgtctctaaagagagtcacaccccaaagcctctttattcttttcggtatgttatcgttcacacttttattaccttgttttcattaattgagatgattttgatgccctgagacgtattatgagtttgcggtttggcactctgatgctccgtggcatccgcctcgttttatggtttgctttcggtttgcgaattttatttggtcccgtagatacgtacgcatggtttatcgccctgcatgcttttcagagttagacctgtcggtggcatatgccaccgtggccacccgctggcagcttacctgtcctggatgctatgactttgctgaacggagctgctcctgttagcgcgccctgtggctgcgagacgcagctccgcagtggccgataaagcaaacccggccgggctgagccgggccttgtgggggtgcgcggggccggggctgacggggagatgggcggggcaggcagcaggagactcaggccccatccctgggcttttgaaggcgtctacggtgacgtgcagcgcgtgaagatcctgttcaataagaaggagaacgccctagtgcagatggcggacggcaaccaggcccagctgggtaagaggccggggcggccccggggtggagggggcaggggcgggggctgcgttccctctcgggcgcctggtcacgcgggtgctgctcccccagccatgagccacctgaacgggcacaagctgcacgggaagcccatccgcatcacgctctcgaagcaccagaacgtgcagctgccccgcgagggccaggaggaccagggcctgaccaaggactacggcaactcacccctgcaccgcttcaagaagccgggctccaagaacttccagaacatattcccgccctcggccacgctgcacctctccaacatcccgtgagtgctgggccggggggctcatggggccgggggcgggcaagggctctgcttggctgtcctaccgcgtcggtgtgtggacttctggcgtttccagagtgcaggtcgggcacctcttaccccaaacctgaagtactgcaaggcctggagcttgagccgagggctgctcaagggagggggtcgttggacactttggaggttttggctcaggggatgctccctgtgagaatgtataatgcacacatttatttatttatattttttgaggcgaagtcttgctttgtcacccaggctggagtacagtggaacgatctcggttcactgcaacctccgcctcttgggttcaagtgattgtgccacctc[134 bp omitted]gcctcccaaagtgctgggatacaggcgtgagccaccgcgcctag[132 bp omitted]cctcccgagtagctgggagggactataggtgcccgccagcacgcccggctaattttttgtatttttagtggaaacggggtttcactgtgttagccaggatggtgtcgatctcctgactttgtgatcaacccgcctcggcctcccaaagtgctgggataacaggtgggagccaccacgcctggcctaatgcacacctttataatcccagtactgtggggggccgggcaggggattgcttgaacccaagagttaagaccagcctgagcaataaagtgagacctctgtctctacaggaacaattggttaaaattagctaggagtggtggtgtgcacgtcaggtcccagctcttccggattgggaggttgaggtgggaggttcacttcgcgctcaggaggttgaggttgcagtgagctgtgattgcactgccagactccaggctgggcggcagagtaagaccctgtctgtaaaaattacataatgcaagtatttggaaatgcaggtacatctggccccaagcatgtcaaccagtagtaagccctttgatatttaacacgttacttgtgaaatgttatcagaaaatcaacaaggggcctggcagagtggctcacgcctatcatcccagcactttaggaggccgaggcaggcagatcacctgaggtcaggagttcaagaccaacctggccaacctggtgaaaccccgtctctactaaaaataaaaaaattagcctggcatggtgttgcgtgcctgtaatcccagctacttgggagactgaggcaggagaatcacttgaacctgcaggcggaggttgtggtgagctgagatcacgccactgtgctcccgcctgggcgacagagcaagattccatctggaaaaaaaaaagtggaggagcgtggtactctgtttctgcaaacttgtagatgcctggtttcgttagaagctgcttcagaccattgtggacatgatttgataccccatttctgggctcctaaaaggccctacgccttccccggctactctgaaaactagtctggggaaagcctcgcggacctgactgggcgcccccacccccacgcggccccaggctcacgcctttctcctcccacaggccctcagtctccgaggaggatctcaaggtcctgttttccagcaatgggggcgtcgtcaaaggattcaagttcttccagtgagtatgaggcgggctgtccctggctctccccaggctgccctgcggccggccctgaccccctgtcttgcaggaaggaccgcaagatggcactgatccagatgggctccgtggaggaggcggtccaggccctcattgacctgcacaaccacgacctcggggagaaccaccacctgcgggtctccttctccaagtccaccatctaggggcacaggcccccacggccgggccccctggcgacaacttccatcattccagagaaaagccactttaaaaacagctgaagtgaccttagcagaccagagattttatttttttaaagagaaatcagtttacctgtttttaaaaaaattaaatctagttcaccttgctcaccctgcggtgacagggacagctcaggctcttggtgactgtggcagcgggagttcccggccctccacacccggggccagaccctcggggccatgccttggtggggcctgtgtcgggcgtggggcctgcaggtgggcgccccgaccacgacttggcttccttgtgccttaaaaaacctgccttcctgcagccacacacccacccggggtgtcctggggacccaaggggtgggggggtcacaccagagagaggcagggggcctggccggctcctgcaggatcatgcagctggggcgcggcggccgcggctgcgacaccccaaccccagccctctaatcaagtcacgtgattctcccttcaccccgcccccagggccttcccttctgcccccaggcgggctccccgctgctccagctgcggagctggtcgacataatctctgtattatatactttgcagttgcagacgtctgtgcctagcaatatttccagttgaccaaatattctaatcttttttcatttatatgcaaaagaaatagttttaagtaactttttatagcaagatgatacaatggtatgagtgtaatctaaacttccttgtggtattaccttgtatgctgttacttttattttattccttgtaattaagtcacaggcaggacccagtttccagagagcaggcggggccgcccagtgggtcaggcacagggagccccggtcctatcttagagcccctgagcttcagggaaggggcgggcgtgtcgccgcctctggcatcgcctccggttgccttacaccacgccttcacctgcagtcgcctagaaaacttgctctcaaacttcagggttttttcttccttcaaattttggaccaaagtctcatttctgtgttttgcctgcctctgatgctgggacccggaaggcgggcgctcctcctgtcttctctgtgctctttctaccgcccccgcgtcctgtcccgggggctctcctaggatcccctttccgtaaaagcgtgtaacaagggtgtaaatatttataattttttatacctgttgtgagacccgaggggcggcggcgcggttttttatggtgacacaaatgtatattttgctaacagcaattccaggctcagtattgtgaccgcggagccacaggggaccccacgcacattccgttgccttacccgatggcttgtgacgcggagagaaccgattaaaaccgtttgagaaactcctcccttgtctagccctgtgttcgctgtggacgctgtagaggcaggttggccagtctgtacctggacttcgaataaatcttctgtatcctcgctccgttccgccttcgttgctggcttcctctttctgtgccgcgggcggccccgactcccgcccgggtgtccgccgaagcgccaggtggggccacgggcggggtgggcccggccctgagagtgggggtccctgcgtggggcgtgcgggccagagcgaatgaccaagagccggacctcggtttctgccgctttattgagcatccgcgcggccgcccgcgccctcggcccgccccccgcccgcccccggccccgccgcgctagtcggggaagcggcgcgcctgcatcttgcggaagtagccctcggcctccgcctccgcctcgcgctccgccagccccaggccgcccgcgtggcgccgcagcgtggactcccggctgcccgggcccagcgccccatcggccgcgcccagcgggggcagcccctcgcccgtggccaggttgacggtggccacggccccgaaccgcggctcctcctggtccacgtcgctgaccgacgagccgggggacacgcccgggggcttggccccgccgcggaagccgcgcgccaggtcccccagctcgtagccgccgtcggcctccgccttggccccgccgcccgccgccttccactcccagggcgcgccgccggccgacaggtgcaccacggggtggtgcggcgcgtgcgcgtcgatggtcacgatgctggcggagtcgcggtccgacggcgaccggtactgcgaggagtcggagctggcgctggacgacgacgccgtctcggccgccttggggcccggcgcgcccggagccttggacatggcgatgacctgcagcagccgcggagggttggccactgccgccccgctcttctcggccatcatgagccacttggcgcgcaccccggcgccgcttttgggggacaggccggcccccgtctgcgcgccctcctccgggatgtgcaccagcggcggcggccccgcgcgcggtgggaggatgacccgaggccccagccccggccgcgcctgcacggtggggtagagcgagggcggggccgggccctcgtcctcctcctcttcctcctcctcctcttcctcttcgtcctcctcctcttcctcctcctccgccatgggttcggcgggcgcgcgcaggtgcccggggctggcgtcgtcgggcagccccaggccgcggccctccaggctcttctgcttccactcgctgatgagctgcttggagcgcgaggcgtccagcggcacgtggatggtcatgtggcggcgcgcggggtcgtccagcgagggcgcgctggccctgggcagcgtgtggctgaaggtcaccatgttctccttggccatggggctgcgcggggccagcaggtccacgtccacgctggcgcgcttcaggctgcccagcgaggtcttctcgcgggccacgggccggggcgcgccctccagccgccctgggggccccagctcgtcggtgctcaccgacttattctgctgataaaccgagtcgtggccccgctgcgtcagggcccgcagcgcgtccttggcgggggccggggccgcgggcttctctgcaggtggggcctggaagttgcccaccgcgtggcaggcctgtcggggagaggggtctgggggtgaggcctggggctcagagggctcctcccctgtgatcgttggacttgccgcggggggctctggaccgggggtgggggctggcaagctcttgtccagtgggaccggttcccaccccaaggttgctgacccagcacatcgggcaggtctgagcccacgggattctgactccagcattccaagggcgagacacttcagcacccatgccttccccctaagaccccttcgggacccacgtctatcccctcagacaccctgggcacccgtgcctcccccctagagcccctgggcacccatgcctcccccctcagaccctctgggccagccccccgccagaacccctgggaaccatgcctcacccctcaggctaccagcctcccctgtcagaccccctgagcctgcctcccacctcagacccctgggccagcctccccactcaggccctgtgggcactcatgcctcccccctcagatcccctgggaacccatgccgacccccatcagaacctgccactcaccaggtaggcagcgatgcccgccccgatgaggaagccggcatacacgtccacagggtggctgcggtactgcgtgatctgcgtgagcccgcatacgcccgcggcgatggcaaaggcgaagaccaggatgggcttcagcagcttggtggtgtccgagatgaccgagttgaagtacatctggggcatgggggttggggtcagggagggctccccacgggtcagcaagagggcctgggaagggcagtgaggggccggactcaccgacacatagaccgcggcgaaggctgacagcgtggcgtgctgggacgggaaggtcttcctgtaagaggcgtccagcgtgagccccgcccacctggggaccccagctccagtggcctctctgtgtctctgtttccccgcatgttcaccggggcggaagaaggctcccagtcaggggagttgggggtccggctcaccgtgcagacaggatggcgtggatgtcgtggccggagcagatgtcctgcgtgatgtaggggttgacctcgcaggacgtgcccaggagagtgtagttgggcttgcagacggtgaggaagaagggagtgtggtaacccgtggccagctggatcacgtccgtcaccagggctgtggcacacaggccgaacacgtggacacctgcagggcggaaggctcggccaggcggggagctggggacccgggacagccccaccccctgcatgtggaggtagctcagggtcggggcgcgtcccgcaactcacccacaaaccgcaccgtacgccgcaggaaggagttgaagttgcagccgccggcgttgatgctgccctccgccccggcgggccccccggcacggccccacagccgggactgcagacagtacaacatgccctcggccaccatgatctgccaacagggagggggcgctcaggcctcggtgcccacagggagggggcgctcaggcgggctcccatctgcagtgcccacaggctggcacaggccccggtgtggatgttcaccgaggtggcgggggtgggctcccagccgtggtgcccacaggctggcacaggccccggtgtggatgttcaccgaggtggcagtggctgcggtgcccacaggctggcacaggccccggtgtggatgttcaccgacaggccccagtgtggatgttcaccgaggtggcgggggtgggctcccagccgtggtgcccacaggctggcacaggccccggtgcaggtgctcaccgaggcggcaggggccgcgaaggccaagctgagcagcatcagcagcgggatgagctcctcgttggtctccacgtagggcatggagagagtgcggtcatagcactggaagcccaccttggccggcttgaagaggtcggtcagctccaggaagtacaaggatacgatggaagaagccactatgggcagctgtggggacaaggtgggccaggttcaccctgctctccctcgcggaggcgtctgtccagccctccatgaattcagggccatccaccgtctcactcacctatccacagatccaacccgctcccagccactctttcccccatgagttattcatccatccacagatgctccatctgtaactcgaccatctacacatcacacacccactcactcatcctccatccacccaaacacctatgcccccaacatccacccactcaccgacccatcacccacccatccatccactgggaaccatccatccattcatccatccacccacccacccatcatctatccacccattctccacccatgcacccaacggtacccatccatccatccatccatcacctagccattcattcatctgtccatccatccatccatcatccacccatgcagccatccatctatccacccacccaactgtccatccatccacccacccacccatccatccgtccattcattacccagccattcatccatccatccacccacccatcatccatccacccattctccacccatgcacccacccacccatctacccacctacccatccatccaaccgtccatccatccattcattacccagccattcattcacccatccatccatccacccatcctccacccatgcccccagtggtacccatccatccatccatccattcatcacccagccattcattcatctatccatccatccatcatccacccattcatcatccagccattcattcatctatccatccatccatcatccactcatgcacccaatggtaccatccatctatccacccacccaaccgtccatccatccgtccattcattacccagccattcattcatccatccatccacccacccatcatccatccacccattctccacccatgcacccaacagtacccatccatccatccatccatcacctagccattcattcatctatccattcatccatccatcatccacccatgcagccatccatctatccacccacccaactgtccatccatccacccatccacccacccacccatccacctatccatccacccatccatccattgatcacccatccatccatccatctatccaccctcccacccacccatctaccaacctacccatctatccacctactcatccatctacccatctgtccatccacaacagtcttgctctgttgcccaggctgcagtgcagtggtgccatctcaactcactgcaacctctgcctcctgggtttttgtatttttagtagagacagggtatcgtcatgttgcccaggctggtctcgaactcctaggctcaagtgatacacccgccttggcctcccaaagtgctgggattagaggcgtgaggcaccgcacccagccatggcctcaagcctttttttttcccccactctgtcacgcagcctggagtgcagtggtgcaatctcggctcactgcaaactccgcctccaggttcaagagatcctcccacctcagccctccaagtagctggaattacaagcgtgcactaccacacctggctaattttttgtatttttagtagaggcggggtttcaccatgttccccaggctgccctcgaacttctgacctcaagtaatccacctgcctcggcctcctgaagtgctgggattacaggcatgagtgaccttgctcaggcatggccccagtcgtaatttctgccttgttatggcatcttagcaggggttcagccctcagtccagtcctggggagggcacaggtcagggctgggggctccaggaagggaaaagccatcactgaacatcccagggcagaattggatcgagggagctgagttcatgtccagtgagcattcattgagtgcctgttgcatgcaggcacgaggcccggggcagacgcggaaagtgggtagcagcgtttgtttgcacctgacacccggtttgaaaaccacccactttaacctgtgggcggccagcagaccccctgtgcctcagtctcaccagctgcaaaatgggaatgataaagtagccgcctccaagggctcaggtggagatgagtcaatgtgggaggtggcccctggcaactatctacttgttctctccactttcattatcagcatgattttgctggggcgggcagacagcatcaagcccggggagggtctgaggtggggcctgggcgcggccttaaaaatatctaaccatgggccgggtgcggtggctcacgcctgtcatcccagcactttgggaggccgggacgggcagatcacctgaggtcaggagtttgagaccagcctggccaacatggtgaaaccccatctctactaaaaatacaaaaattaacccagcgtggtggtgcgtgcctgtagtctcagctactccggaggctaaggtgggagaatcgtttgaggacgggaggtggaggttgcagtgagctgacattgttccactgcactccagcttgggcaagacagcaggactccatctcaaaaaataataataataaataaaataataataataaggccgaccgcagtggctcacacctgtaattccagtgctttgggaggctgaggcaggaagatcacttgaggcctggagttcaacgctagc[311 bp omitted]caccacgcacagcctactaaaaatgatttttaaaaattagctggggctcaggctagccttgaactccaggcctcaagtgatcttcctgcctcagcctcccaaagcactggaattacaggtgtgagccactgcgctcggccttattattattattttatttattattattattttttgagatggagtcttgctctcttgcccaagctggcgtgcagtggaacagtctcagctcactgcaacctccacctcccgtcctcaagcgattctcccacctcagcctccggagtagctgagactacaggcacacaccaccacgctgggctaatttttgtatttttagtagaggtgtggtttcaccacattggccagactggtctcaaactcctgacctcaggtgatctgcccgtcccggcctcccaaagtgctgggatgacaggcgtgagccactgcacccagcctactttttttttttttttttccgagatggagtctcactctgttgcccaggctggagtgcagtggcgcgatctcggctaactgcaacctccacctcctgggttcaagcgattctcctgcctcagcctcccgagtagatgggattacaggcgcccaccactacgaccaccatgcccagctaatttttgtatttttagtagagatggggtttcaccatattgaccaggctggtctcgaactcctgaccttaggtgatccgcccacctcggcctcccaaagtgctgggattataggtgtgagccaccatgcccgtcctgcaacaggaatttaagtgcaatttcgaaaaataaacagattttctatgaagtgatgtgggcaacttaatgatattgtgtttgggagggacccacttgcccgggtgtgaggtaacggattacaggccagccgctggccgtgtgacctgcacgggtcactgcttccttgagactagggtcccgtcttccatcgaggctctggaaggcccatcactagagccggttttcctggcctgacatgcaaggatggattaaagttattttattttttgagatggggtctggctctgtcatccaggctgaagtgcagtggtgtgatcttggctcactgcaacctccgccacctgggctcaagtcatcctccatctcaggctcctatgtaactgagacctcagctgcacaccaccacgcccagctattttttctgtttttaaaattttgtagagatgggtttttgccatgttgcccaggctagtcttgaactcttgggctcaagcaatccatctacctgggcctcccaatgtgttgagatcacaggcgtgagccaccaccccagccttaagttactctaccatcctgagccaggtgtgtgccaaaatggtagcttttttgttttagagacagagtctctgtcatccaggctggagtgcagtggtgtgatcacaactcactacagcctcaacctcctgggctcaagcaatcctcccacctcggcctcctaagtagctgagaataaaggcacgcagcacacgcccaactaatattttaattttttctgtagagatgggatcttgctgtgttgcccaggttggtctcaaactcctggcctcaagtgatcctcccacctcagtctcccaaagtgctgggattacaaacatgacaaacgtgagccaccgcacagggcagggggctccatttattacatttattgtcttctttttttttttctaagacagggccttgctctgttgcccaggctggagtgcagtggcatgatctctgctcactgcaacctccacctcctgggttcaagcgattctcctgccccagcctcccgagtagctgggctcacaggcataagccaacatacccggctaatttttttgtattttttagtagagatggggtttca[280 bp omitted]acgtttccgtattctgtagatattaattcctatcagctccaggagtggaaaagcggaggcccagagaggttaggggcagggcaccagcctcaccattagcagaggtgaactcagaccctgaggcttcggagcccacgcggcacctgcacccaaccccaccccctccggcctccccgccccctccaggcccccagcccccgacccccagcccctctgaccacaccttggtcagaagggctcccctcctagcacctgcccacagttcccacggcctggacccccctcggttcctctggagctcctactcgacccgcacagcccaagtcctctgccccaccccccatccgccggacaccccggtcctgccccgccccgaggccactgccggggcagctgcgccggctccggtcccccagcgcgggggtctctgcgggcgggcggaaccgaggcgtctcccccgggccccagcgcgacccccacccacctccacgaagtagaagcagggcagaagcgtcatgctgtccttcgggatcttgttcttctccttggtggagatcatggtgccgcgggcgccgcaggccgtggctggaggggagaaagcggcgctggaggggggcgcgcaggcggagcccgggggagacacggtggccggcgccggcgggggaggggcggtcggggaaactgaggctgcagagagcggcgtccgcgtggcctccccgcgccccggcccagcacgcggcttccgggcgcccctacacccgggatcggggggtcggggccgggatcgccgaggagggcggggggtctccgggcgggagccagtccccgcgtggtggtggggggcatccgggagaactggggttccgggcggcggaggagactgggtccgcgcccccagccccacagcccctcacctggcgcggccggcgcccagcacaaagcgcgtctcctccgtggggcggggccgggagccgggaaggggagggggacgggggaggggagggtccggcccggagacccccgcgcgcgcccagacgccgcagcccagacgccgcagccaggggcgggggctctttgtctgggcgcgtcctccgcaggccccgcgcaccgtccccgcctccctggcgccgcctcccaccgccgggggtctcgggggtctcaggtctgcgcgagcggctggcggggctcgggggtcgcgtcctcctcccttcgggcctgcggcggtgacggtcccgtcctcccctcccgggtggctgcggtcggcccggggggcgccatcgagacgggggcggaggcgggggcgggggttggggtttcggggtctctgactgtctccgtgtctctcacggtctctcgccggctccgactgcccccgccccgcgcctccgcccgcccctccgcggagcccgccgctcgctggtgcgcgtttccatggcgaggctcccagggcgcccggagcatcggagacaaaagagctgggggagggggactggggggtctcccggtgcctccctcccttccccccgcactcaccctcgccccctccgccgcgccggggtccaccctccgcctggccgcagccgctcggtgcgcacggcgggattgcggggcgcggggctgggggctgggggctgcgggatgcgggcagggccctcgggacccgcactcgggcagtgcctgctgtctgcgtgcatttcctcctccatatgcgcagccctgcggggtaggggctggttgacccccgttgtagggatggggaaactgaggcttgggcaccctgggtcgcaatccgaggtctccgggccccaaacggcaggatttacaaaaatcggtttttgggccgtgcgcggtggctcaggcctgtaatcccagcactttgggaggt[134 bp omitted]gaggcaggagaatcgcttgaacctgggaagcggaggttgcagtgagccgagatcgtgccactgcactccagcctgggcaacaagagcgagactctgtctcaaaacaaacaaacaaacaaacaaacaaagagtgacttccaggctgggtgcagtggctcaggcctataatcccagcactttgggaggcagaggcgggaggatcccttgaggccaggagttccagaccagcctggccaacatggtgaaaccccatctctactaaaaatataaaaattagccggacatggtggcaggcgcctgtaatcccagccagatgggaggctgaggcaggagaattgcttgaacctgggaggcggaggttgcagtgagccgagatggcaccattgccctccagcctgggcgacagaaggagactctatctcaaaaaaaaaaaaaaaaacaaacaaacagtgactccagagggttggagccctgctagataccttagtttgctcataacaggcactgctgcccccgggaagagggtcgcctgccataaatgcggaaacagttaaatggcgatgggaataggatgggaactcaatggtgttgctacctttggatggactcggaggcagcccagcttcctgggacaggactgcacggactgcctggggaggggtctttggccccccggttcctgcaggggggctcggggaggccctgtgagcagttggtcacaggtgggtcccattcgatgcgatcctgttcctccccaacagccctggagaagggggacgttgcctgctgtggctgcggctgttttcctggcctgtgagaggcggggccagagtggccgttgggaatctgggtgttgcaaggtgaccacaaacagctctctgggggaggaggaggaaaatgcaattgattttcaggagccttctgaggtcaggagtgggagagtgtgcagggggaccctcctggcagcttgggggtccaacagaagatctgggggagtctcagggtcttctccccctaggatcaccagtggtggagatggggcaggcctggccatggagggcacgttgcttggctgaggggcctgggcttgagtgtggggcctgggcttgagtgatgggagagttccgagcaggccggaggggttgagcgtaccagacgctgctcaaaacttttatttaaaaatgattattattattattactattattttgagatggactcttgctctgtcgcccaggctggagtgcaatcgtgcgatttcagctcactgcaacctcccacctcctgggttcaagtgattctccctcctcagcctcccgagtagttgggattataggcgcctgccaccacgacgggctaatttttgtatttttagtagaaagaggatctccccatgttggtcaggctggtgttgatctcctgacctcagctgatctgctgcctcagcctcccaaagtactgggatgacaggggagccacggagcccagcctttttttttttttttgggagacggagttgcactctgtcgtctaggctggagtgcagtggcgcgatctcggctcactgcaagctccacctcccgggttcacgccattctcctgcctcagcctcccgagtagctgggaccgcaggcgcccaggactatgcccgggtaattcttttgtatttttagtagagacggtgtttcacc[140 bp omitted]ccaaggctggtctcaaactcctgggctcaagtgatcctcccacctcggcctcccaaggcactgggattacaggcgtgagccaccacgcccggcctcaaaaacttttcagaatatgaaccccactccatgctcagcactgttctgtctagaaggcagagtctatccctgtctcagggcacactgacgtgcagacagcgagctcgccctgaggtcatgcgactgggagggacagagcttccggctcccggcagaggggaaatggggcctggcccacgggagagctgaggcccacgtttggccaggacagggtggatggaggctggggcctccgcagggaagatggacaggtaggatccggggtgggcagagagggagagctggcttggacggaggcagggatctgggggctgtgccatggaccctgtgaggtggctgggctgtgaaactcagtggagaccggaattattattattattattatttttttgagatggagtctcactgtctcccgggctggagtgcagtggcacgatctcggctcactgcaagctccgcctcctgggttcacgccattctcctgcctcagcctcctgagtagctgggactacaggcgcccaccaccacgcccggctaattttttgtatctttagtagagatggggtttcaccgtgttagccaggaaggtcttgatctcctgacctcatgatccgcccgcctcggcctcccaaagtgctgagattacaggtgtgagccaccgctcccggcctggagaccagatttgagccctgggaccctacattcccgatgggcagcggacctcaaggcacaccggccccgcctccctggactctccccgtatccgccccttggaggggcaaactgccctcagagggctcccacaggcccagacacaaactggtgtccccaagggtgtgggggacacggtaagctccagacctcagtttcaccttggaaatgagcccctttgtaaaaaatggaggtgagtttggacgcagtagctcacacctgtgctcccagcactttgggaggccgaggcaggtggattgcttgagcttaggagtttcaaaccagcccgagcaacatagtgagactccacctctacaaaaaaatacaaaaattagccgggcatggtggcatgtgcctatggtcccagctacctgggaggctgaggcaggaggattgctggaacccgggaatcggaggctgcagcgagctgagatcgtgccactgcactccaccctgggcaacatagtgagatcccatctctacaaaatatacaaaaattagccgggcacggtggcgggtgcctgtggtcccagctactcgggaggctgaggcaggaggatcagttgaacccaggagattgaggctgcagtgagctgagatggtgccgctgccctccagcctgggcaacagcgagacctcaactctgaaaaaaacaaaagaaggagatgaaatttacataacttaaaattagccattttgaacggtacagtgaagtggttttcggtgcattcaccgacttgtgcaaccatcactgctgtccagtcccagaacattccatcaccccaaagaaggaagccccatctccatccatcagccatcaccccctgccctcccccggcccctggcaaccacagatccacttcctgcctctgcagatttgcttgttctggacatttcgtctatttatttttatatagtttttaatttgtttttatttattttttttgagacggagtctctctgtgtcacccaggctggagtgcagtggcgcaatctcggctcactgcaacctccacctcccaggttcaagcgattatcctgtctcagcttcccaagtagctgggactataggcgcccgccaccacgcccagctaatttcttttttttttttgaaatggagttttgctcttgtcgcccaggctggagtgcaatggtgcgatctcggctcgctgcaacctccgcctcccaggttcaagtgattctcctgcctcagcctcctgagtagctgggattacaggcatgtgccaccacgcccagttaattttgtatttttagtagagatggggtttctccatgttggtcaggctggtcttgaacgcccaacctcaggtgatctgcctgcctcggcctcccagagtgctaggattacaggtgtgagccaccgcacccagcttgtcaattatatctcaataaagctgttgaaaaagtttaaaaaaatcacccaatcgggcacagtgtttcacacctgtaatcccagcattttgggaggccgaggtgggtggatcacctgaggtcgggagtttgagaccagcctggccaatatagtgaaaccccatctctactaaaaatacaaaaaattagccaggcgtggtggtggacaactgtaatcctagctactcaggaggctgagacaggagaatcacttgagcctgggaggcggaggttgcagtgagtcgagatcacaccattgcactccagcctgggcaacaagagcgaaactccgtctcaaaataataataataataataataataataatcacccatacagacgcgcaggactcaacgcaggactgccagctccactgccctgagccccccggtgccaggcccagcgggcagtgctggagccccagtggcttgggatggggagactgggactctgagctggcaatgttcctgggtgctggctgcatgcccgccatgtgctgggctccgggatccactggttcctgacaccctcacctgcccctgggggtgtggccatcttctagagagggaaactgaggatcagtgcagaatgtagggggagcccaggctggcccagggagcagttggcggtggaggccttgggcaatttcccgtgttcccactgagtggggctgtccctgggcctgggcggggacgccaccaactgccaaggcctgtgtataagggcagccgccgccttagccacagacctgccccgccatgacccggctgacagtcctggccctgctggctggtctgctggcgtcctcgagggccggtgagtgcctctctgtgccggtggtcccccatctgtgctagggcccggctgccagggcagaactcagacttaaagcacagagaaggcaagcggcttggcctgggtcacacagccagcccggcctggacgatcccgcgaaaggcgtgagggcggacggtgtgcgggactcaggggccccctgtcctcttagggagtgggacgatgggggagggtgggtccccccgcagccccactgggtggatagagctgaggctgcagcttcacacgccctcccggccactgtgtggattcttggggatctcagagctgtctccccccgacccaggctccagcccccttttggacatcgttggcggccggaaggcgaggccccgccagttcccgttcctggcctccattcagaatcaaggcaggcacttctgcgggggtgccctgatccatgcccgcttcgtgatgaccgcggccagctgcttccaaagccagtgaggggtcctggggagggggcctagggggcattggggctcagagaaggggcttggggggcttaggcattcagtgggggtgcttggtaggtgaggaggggaggggattgcaaaaggaggggctcagggaaaggagggggcttggagagggaaatggggactgagttgaggagggacccaaggatattggggggctcagatggaggaggcccagagaagggaagggggtcagatggaggaggcccagagaaaggaagaggctcagatggaggaggtgcagtgaaggaaagggggtcagatgggggaggcccagagaagggaaggggctcagatggaggagggggcccagagaaaggaaggggctcagatggaggaggtgcagagaagggaagggggtcagatgggggaggcccagagaagggaaggggctcagatggaggaggtgcagagaagggaaggggctcagatggaggaggtgcagagaagagaagggcctcagatggaggaggtgcagagaagggaagggcctcagatggaggaggtgcggagaagggaagggggtcagatggaggaggtgcagagaagggaagggggtcagatgggggaggcccagggaagggaaggggctcagatggaggaggggcagagaagggaagggggtcagatgggggaggcccagggaagggaaggggctcagatgggggaggcgcagagaagggaagggggtcagatggaggaggtgcagagaagggaagggggtcagatgggggaggcccagataagggaatggggtcagatgggggaggtgcagagaagggaagggggtcagatgggggaggcccagataagggaaggggctcagatggaggaggtgcagagaaggggagggggtcagatggaggaggctcagagaagggaagggactcagatggaggagggggcgcagagaagagaaggggctcagatggaggaggaggcgcagagaagggaaggggctcaagatgggaagggggccctggaaagtctcggctctgcttctgtaaaagcgggggagttttcagggtgaaggattgcagtctgcaggctgggatcccccctaatttgcaagccggcttgctctgtgcccaggccccagcctggtgtcctccctctgccctttcctccgctactctcaggaaccccggggttagcaccgtggtgctgggtgcctatgacctgaggcggcgggagaggcagtcccgccagacgttttccatcagcagcatgagcgagaatggctacgacccccagcagaacctgaacgacctgatgctgcttcaggtgagaggatggtgccacctgtgatcccagcacctcgggaggccgacgttagccagggaaacaagtccaaacttggtctctacaaaaaaatacaaaaattagccgggagtggtggcgcgcacctgtggcccctgtgcttcaggaggccgaggcggaaggacggcttgaggtcaggagttcgagaccagcctgggcaacatggccaaactcagtctctacaaaaatatatatgtgtgtgtgtgtgtgtgtgtgtgtgtgtgtgtgtgtgtatcttgccgggtgaggtggctcatgcctgtaatcccagcattttgggaggccgaggtgggcggatcacgaggtcaggagattgagaccagcctggccaacatggtgaaaccccatctctactaaaaatacaaaaattagccaggcatggcagcgggcgcctctagtcccagctactcaggaggctgaggcaggagaatcgcttgaacccgggaggcggagcttgcagtgagccgagatcgcgcccctgcactccagcctgggtaacagagccagaccctatctcaaaaaaaacttccaaaaacaatacagcaacacatacagatgtaccacggttcgcgtatggagcctcctgttggtggagactgacgtcgttttcaaatgcttttgctatgacagaatcatgtgaatgtttttcatgtttggtttttttctttgagaaaatgataaaattatctcaaaaatatcattaaaaaatttaaaaaagtagagacgggggtttcaccttgttggccagtttggtctcgaactcctggcctcaagtgatccacccaccttggcctcgcaacgtgctgggaatacaggcgtgagccaccgcacccggcccctgccgggaattaaacgcaaaccacttacagactacagttaatgtcgctgacacttctgctcccaggggtccccatgaggctccagtccccagggccaccctcccctgactccatttccttccccagctggaccgtgaggccaacctcaccagcagcgtgacgatactgccactgcctctgcagaacgccacggtggaagccggcaccagatgccaggtggccggctgggggagccagcgcagtggggggcgtctctcccgttttcccaggtttgtcaacgtgactgtgacccccgaggaccagtgtcgccccaacaacgtgtgcaccggtgtgctcacccgccgcggtggcatctgcaatgtgagtgctccctgtggcgggaggaggggtcctgagaggtactgagctctccgtggcaggagaaagcaagtgcaggctgagggcggcac[151 bp omitted]gcgattctcctgcctcagcctcctaagtagctgggattacaggcatgcgccaccacgcccggctaattttgtatttttagtagagacagggtttctccatgtgggtcaggctggtctcgaactcctgacctcatgatcgacccaccttggcctcccaaagtgttaggataacaggcatgagccaccgtgcctggctgagaaacagtagctatcaaacgccggctgtgagccacgtctgtgctgggggttggggacccagcaggcatggtagagccggtcactgagggactcaggcgtgtgattgccaggggaggggcacctggcccagcctggaggtgccaggaagctccagaaagcaactgatcccaaagtccactagcagttaaccagggcagagaaagagaagagccatgcaaaggccctggggctggatcaggacttgtaggttccaggggcagcaagaggcctctgcagttctggggtggcgtgggagccaggccctgggacgccctgacacagctgctgcctgcccagggggacgggggcacccccctcgtctgcgagggcctggcccacggcgtggcctccttttccctggggccctgtggccgaggccctgacttcttcacccgagtggcgctcttccgagactggatcgatggtgttctcaacaacccgggaccggggccagcctaggggggcctgtgacctcccatggagcccagccccgccctccacacctccggcgctccgcacccacctcccacggccccgcccctgcccccgctccggccagaggggccctggctgtaataaagaagccgatctctcctctgctcctggtttctgttcattggtgggggagggggctgtggggacgcgtgagtggcaccttcaccggccttaggggcacccaccgcaggtgcactgcctgtgcagatgtcagatgttcagagattccctcaaagcccgggaagcaggggctggtgttatctgcacccgacagcggggtgttggggggaggcccaggttcagagaggttgggtggctgcccagaggtcacacagtgaatgccgcccagcactttgggaggccgaggtgggcggatcacctgaggtcaggagttcaagaccagcccggccaacctggtgaaaccccatctctataaaaatacaaaaattagccgggcatgatggcgggcgcctgtaatcccagttacttgggaggctgaggcaggagaatcacctgaacccgggaggcggaggttgcagcgaaccgagatggcgccactgcactccagcctgggcgacagcgagactccagctcaaaaaaaaacaaaaaccacgggagaaaacggggaacattctcctcttggatccaatagaaacagtaaaacgtgaatatgaaataataaatataattgtatatataaataatacagaataaaatatgaatatgatggctggatgtggcagtcacatctgtaatctcagcactttgggaggccaaggtgggagcatcgtttgagcccaggagtttgagaccagcctgggcaacgtagtgaaaccatgtctctacaaaaataatttttaaaattattaaaattacacaggagaggccggg[138 bp omitted]gtggcgggcgcctgtagtcccagctactcgggaggctgaggcaggagaattgcttgaacccgggaggtggagattgcagtgagccgagatcacgccactgcactccagcctggtgacagagcaagactccgtctcaaaaaaaaaaaaaaaaagccgggtaagtggcacctgtcgtcccagctactctggaggctgaggtgggaagattgcttgagtccaggaggtggaggttgcagtgagccgtgatcgcaccactgcactccagcgtggtccacagagcaagacccagtctcttaaaatgataataataataataataataataataataataataagaagaagaagaagaagaagaagaagaagaagaagaagaaggaagaagaagaagaagaagaacctgtagtctcagctattgaggaggctaaagtgggaagatcactttagcccaagaggttgaggatgcagtgagctatttttatctcatttatttatttatttgagacagagtctccctctgtcacccaggctggagtgcagtggcgcgatctcggctcactgcaacctctgcgcccccagttcaagcaattctcctgcctcagcctcctgagtagctgggactacaggtgtgagccacaatgcctagccaatttatatatatatattttttagtagagatggggtttcattatg[139 bp omitted]aggctggagtgcagtggcgtgatcaaggctcactgtagcctcagcctcccaggcttcagcaaccgtgcccggccttagaattcactcttttaaagtgtgtacagccgggcgtggtggcccacacctataatcccagcactttgggaggccgaggctggcaaatcacctgaggtcaggagtttgagaccagcctgcccaacatggtgaaaccctgtctgtactaaaaatacaaaaaattagcctggcatggtggcatgcacctgtaatctcagctagtcgggaggctgaggcaggagagtggcatgaacccgggaggcggagcttgcagtgagccaagattgagccaccgcactgcaggctaggggatagagtgagactctgtctcaataaaataaaaaataaaataaaataaaatgaagtgtgcaattcaatggtcttcggtacactcacaatgttgtgtggtcatgacctctgttgagttccagaatatttcatcaccgccaaaggaatccctgtccccatcagccgtcactccctgtcccctccccagtccgcggcacccacgcgtcctcttcctgtctctgtggatgggcttgtcctggacatttcatagcaatgggatcacacactatgtggtctttcgtgtccggcgtctctcacggagcgtgacgtcctcacggtgcctccgcgccgtggtcgggtcacagctgggtccgtttcacggctgcgtcctgttgccacgcctggaggcctcactgtgctgctcgaggcccctgtggatggacgtctgagcctctccacttccggccactgtgaccctcactgctgtggacactcatgtgcaggtttgtgttggaactgctgcttttctttcttttgtgggtataacgggtccttttttttttttttttttgagacggagtctcgctctgtcgcccaggctggagtccagtggcgcgatctcggctcactgcaacctccacctcccgggttcacgccattctcctgcctc[175 bp omitted]cccggccaacgggttctctttacagagggggaaactaagcctagagaggggtgccaatggctcaggagcccagccggtgggggccctgcctgggtttggagaggcaaagccactgcctgatcattgttcagatggggaaactgaggcccaaggcaggattggggttcaagggcttctggtgcccccggctcggggccacgttcggtcatgagggtccccctgctggggcgggattcctgccagaggcggtttctgccctcctccccccagcccctgctgctcccccttcctgggcccaagggtgctgttctcgggttcccctggtagcggtcagcccggctgcagggccctcagagcggggctgcgtgtgactgtgggcagcccgagtcctctccgcgcctcggatttcagggacatagaacggggtcccatccgtggacccacccgccaccccgcagccccgtccaggccccgacgcgtgcagcccccaccccgcagccccgtccaggccccgacgcgtgcgtgcagcccccaccccgcagccccgtccaggccccgacgcgtgcagcctcctggcagagccagctgtgctcaggctaaaaacagctgttctgtttcttctctgtgcccctctacccggccccactcactggtgtcttgagaaggtttttaaattttcggaattctcagaacagattgtgaaatgtctgggtttggcttagaaatcccgtgagagggggcatcaggggacaggtgggtggatgggcctggggggtgtggaaggcggccgggtgtcagggccccaagcacacgggaaggtcaacggtcggcacaaaacacacacaaaacacaaccactgcgaggctgagcctcgcgggcgaaccagcatcttcccgtcactcagggagagaaggttttcc[137 bp omitted]tctactaaaaatacaaaaattagctgggtgtggtggtgggcgcctgtaatcccagctattcaggaggctgaggcaggagaatcgcttgtacccaggaggcggagcttgcagtgagccgagatcgcgccactgcactccagcctgggcaacagagcaagacttcatctcaaaaaaaaaaagaaagaaagaaagaaaaagaaagtagtagaggagagaaaaaagagagaacaagaaagatggagagacagagacggacagagacacagagacagagagagacggaaaaagagggacagagccagagagactgagagagatagttttaaaaaagggagacagcgatgacacagagagacacagacacagacacagagatgaagagacagacagatatagggagacagagacagactgagacagagagacagagacagagggagacagagacagagacagagaaggagacagaaagagggcggggagagagacagagacagagacacaggcctgagccccgcatgggtctcccctcggccccaggcggcgtcacctgcgatccctgaagccgttaccagttgcgccacctacggttggtacaggaaggggcccccactacctctgcccccaggccgacccctgcaaagcccccagcgtgttccacggaaccctccctgctacccgctcccagcgctcctgtcgccctggcctgtgcttttgagtccccccaggacgcacagggagcctggaggacccggggcccgcgggacggtgctgggaccctccggtcaggaccgggctgcatcagccttgcgtggaaacagatcctgacggggaagcccacgtacagtgaggacggggcagccccctgggcagctctcgcgtgtgctagatccagcagtgtgtgtgcaaggtctttcttttctttcttttcttttttttttggttgacagctttattgagatgtccttcacacacaccaagcaattcacccacttaacaattcggtagtggccagatggtgggggaggatcgctggagcccaggagttccagacgagcc[139 bp omitted]catggtgaaatcccgtctctactacaaatacaaaaaacaaattattcaggcgtggtggcaggtgcctgtaatcccagctacttaggaggctgacgcaggagaatggcttgaacccaggaagccaaggtcacaccactgcactccagcctgggtgacaagaacaaaactccatgtaaaaacaaatcaagaaacctcaaatccgtcgacccccactgctgccctgcagaaggtcctattaccgtcctcacccgcctttacaggtggggaaactgaggactgcaagccaaacagcttgcctcagcatgagctgactcatggctgaaaccaacagcacttttgttgaatgagaataacccttttattttgagacggtgtctcgctctgttgcccaggctggagtgcagtgacgcgatctcagctcactgccccctccacctcccgggttcaagtaattctcctccctcagcctcccaagtagctgggattacaggcatctgccaccacacccagctaatttttgtatttttagtagagtcggggtttcaccatgttgcccaggctggtcttgaactcctgaccttgtgatccatctgcctcagcctcccaaagtgctgggattacaggcaacagccac[137 bp omitted]tgcctcagcctcccgagtagctgggactacaggcgcccgctac[187 bp omitted]gctcatgcctgtgatcccagcatttggggaggtcaaggcaggagcgtccctgaaggctggcagttcaagaccagccagggcaacatagcaagaccccatttctacaaaaaattaaacagccaaccaaaaaaaaaaaaaaaaagaaagaaaaactttagctggacatggtggagcatgcctgtggtcccagctacttggggggttgaggcaggagaattgcttgagcccaggaggtcgaggctgcagtgagccatgattacaccactgcactccagcctgggtgacacagccagaccctgtctcaaaaaatatatatgtatattttaaaatattatatattatataatgtaaataatatacatgctacatattttatgtatacatctatgttatatacattaatatagccaggtgcagtggctcacacctgtgttcccagcactttggcgggattacgggcgggtcacctgaggtcaggagttcgagaccagcctggccaatatagtgaaaccccgtctttactaaaaatacaaaaaaaaaaaaaaattagccaggcgtggtggtgggcgtctataatcccagctatacaggaggctgaggcaggagaattgtttgaacccggg[136 bp omitted]gaccacgtggtcaaggttattaccatcagcacgagacaggccgaagccatgggcttcgacgtggggggcctgagacagacacacgccacgcccgggactccctccattgagtcctgaggccacccaggaccatccccacggagggacgctctgcagagtgaccaccagctctcctcaatggtcccaagggctgagggagggcagagggactgcgcccgctggaggagaccctgacatctgaagatgggtggcttgtgtacccaggacccagcaaagggtggctggtgatactcagggggctggggcagagggggccatttggaatcaactttcgcgccctggcttcgatcacagcctggagggttgagcaagaggacagaatttagggaagctgggggagggaggccgggggagggagtttggggagcggggagggagtttggaccctttggacttctgtaagcgtgaaatcctttccaaatgaaacgttaaaaagctttttttctttttggcctccaagttcattcagtgcttctctccatttcactgtaggtttaaaccgttcagttataaataaataattttatcctctgtcctcggctttcccccgtttccggcactgcagacatgggggctggatttgtctctgcggcggggccatcctgggcactgcagggccctgccaggagctccctccaagtcgtgacaaccacggatgtctccaggcctcacacagggacccctgggggcagaatcaccccagggttagaggattccacagaccccaagagactctgagtcccatgatcctctgccctgctgaggtcccaggaggctgcacacattgaaatccacaccctgagtgggagggagagaggaggcgagtcccgggagctggggtcccccgggtttatgccgtacgccccatcgggagtttattctggtgtccggtgtgagcagggggcagactggattttttattttttatttttatttatttatgttttgagatggagtcttgctctgttgcccaggctggagtgcagtggcacgatcttggctccctgcaaccttcgcctcccaggctcaagtgattctcctgcctcagcctcctgagtagctgggactacaggcgcccgccaacacgcgcagctaatttttgtatttttagtagaga[141 bp omitted]ctctcccctgggccctgtggacatcggggctggatccttctctggggcaggcccgtcctgggcactgcagggtgctaggcatcatccttggcctccacccactccatgccaggagctcccctttcgtgacagccacaggtgtcctcagacctcgcccagggtcccctgggggcagaatcacctcttgattgagaatcctggccttaaagggggaagaaaacccccagacaaaactggcaggaggatgttcgctggggcctcaggtgaggcactgagggcactcgtggtggggccctgccttcccgagctctgcatcctgtcccctgctacgtcctgctgtctgtccgtttccagctcacccacccacgggacacacctgccacggccggctttgctggggccacagggacctcgtcagggaggcgtctccttgtgggtggcacgtgggcatgtgttgctctgagggctgtggccatgttgcccacctggccagggacccccgacttgggtgggtgacagccagcctccccgcccccacaaaggttgggaccttgagcccaaagcccccacctcctccccggagtccgttctgactcccaggctcccaaggcaaaaggaggaagtggggacccagcctgggcattgggcaactcaacggcctctggcattgggctataagaggagcttgaccgtgggtgcaccctggaccccaccatggctcaccggccccccagccctgccctggcgtccgtgctgctggccttgctgctgagcggtgagtgagccacgtgcccatccatccagcctccaggccccggtggattgtggggaaatatccaccacgaggtccatccaaagcccttctggcacagctggggaaactgaggcagggtcaggggagactccactcactgctcgggaccaacgcttgcaggggtggggaggacaagggcaagggggagccctggccatttgactcagttgcctatctgtaaaacgggcaaaacccagcccttccctcctgaggagctgttttgggaattagctagtaacaggcgaattcctggacagcacccagccttcagcaaatgctcagtgaatatgcatgaatgaatgaatgagtgaatgaatgagtgagtgagtgaatgagtgaacaaatgaatgagtgaatgaatcaatgagtgagtgaatgaatgagtgaatgagtgaatgagtgaacgaatgaatgagtgaatgaatcaatgagtgagtgaatgaatgagtgaatgagtgaatgaatgagtgaatgagtgaatgagtgaacgaatgaatgagtgaatgaatgaatgagtgagtgagtgaaagggtcgaggagttagtgatgctggaatcaggggaagaagagagcatgggccccctcaggtccctatcctgaggg[134 bp omitted]gcctcccgagtagctgggactacaggcgcccaccaccatgcctggataattttttgtaatttttgtagagacggggtttcaagg[139 bp omitted]aggctggagtgcagtggtgcaatctcagtttactgcagcctcagcctcctggggtcaaatgattctcctgcctccgcctcttgagtagctgggattacaagcacacaccaccacacctggctagtttttgtatttttagtagagatggggtttcaccacgttggtcaggctggtctcgaactcctgacctgagggggattttcaatgcctcagtttgttcatctgcaaaatgggtctctttgttggctgatttttttttttttttttgcttctttttttttattttgttttgttt[132 bp omitted]tgcaacctgtgcctcctgggttcaagcgattctcctgcctcagcctcccaggcagctgagattacaggtgcgaaccaccacacctggctaattttttttttttttttttttgagacggagtgtcattctgttgccaggctggagtgcagtggggcgatcttggctcaccacaacctccgcttcctgggttcaagcgattctcctgcgtcaacctccggagtagctgggactacaggcacgtgccaccacgcccagctaatgtttgtatttttagtagagacagggtttcaccatgttggccaggatggtctccatctcttgacctcaggtgatccacccacctcggcctcccaaagtattgggattacaggcgtgggccaaccgcacccgaccaatttttctgcttctttaaaaacatttttttaaattttgttttagagacagggtcttgctctgttgcccaggctggagtgcagtggtgtgatctcagttcactgcagccttgacctcctgggctcaagcgatcctccctcctcagcctcccaagtagctgggacgacaggtgcacaccaccatgcctggctaattttaaaattttttgtagagatggggtcctcacaattttgcccaggctggtcttgaactcctgagctcaagggagcctcctgcctcggcctcccaaagtgttgggattacaggcgtgagccactgcacccagccacctggtctgcgtcttaaaagccttcctgactctcaggactgaaagctgccaccagggcgcctttggaaatcgtcgtaattataacccccccggcctgggcgctgagtccttcccaccagccagcaggcactgaccgggttgcagatcgggagacggaggctcggagaggcccaggggctgctctgccatcccccctttccctgcagcctgggggctccctgacgcctggactccccccctgcaggtgctgcccgagctgcggagatcgtgggcgggcacgaggcgcagccacactcccggccctacatggcctccctgcagatgcgggggaacccgggcagccacttctgcggaggcaccttgatccaccccagcttcgtgctgacggccgcgcactgcctgcgggacatgtgagcggccgcctccacacccctgtccgcccgccccgccctcttcctccagccctggcccggccactgtccctctgcccggggaggacccagctaagccccgtctgcagaccccaggccccgcgcgcgtgggcagttctggggggaggcccggggcagggtcgccgagggaggggtctggggctgcaccgcggcctcgggaagggccggctgtgggcggcggcgagtgtccagggcgccgaggagtgaccaccccacccccgcagaccccagcgcctggtgaacgtggtgctcggagcccacaacgtgcggacgcaggagcccacccagcagcacttctcggtggctcaggtgtttctgaacaactacgacgcggagaacaaactgaacgacgttctcctcatccaggtgggcgggcagggccgcgagggctcggaggggcacggccagagggctccgggacccccattcctgcagccagcattcattgagcacccactgtataccgggccacgaccgaggccgctgcagcctgggtccagtggcactggccgggggagaccgctccttggacaccaggccactcctcctccccgcctctcccccgcccgcgcctctcccccgcccgcgcctctcccctgcgcgcctctcccccgcccgcgcctctcccccgcccgcgcctctcccccgcccgcgcctctcccttgcccgcccctctcccctgcccgcgcctctcccctgcatgcctctcccttgcccgcccctctcccctgcccgcgcctctcccctgcgcgcctctcccctgcccgcgcctctcccccggccgctcctctcccccgcccgcgcctctcccccgcccgcgcctctcccctgcgcgcctctcccctgcctgcccctctcccctgcctgcgcctccgcccggtgtgctgttcccccagaaagccaggtgccctcgcctcctccggcgcctcccctgacctcactggaagtggcgaggacagccacagccctccccgattcactgttctccactgaaccgcgtgctcctctcattcatggggccctcctagcctcctcccacccagaaagatcagctccccagggcagaggatttttgtctgtgttgttcgttattggactcatgtggcttagaacgggactgggcatacaggtggtgctcagtaagtgcttggggctgggcactgtggctcacgcctgtactcccagtactttgggaggctgggatgggaggatcacttgaggccaggagtttgggagcagcctgaccaacctagtgagaccccatctctataaaagacattttttttttttttttttttagacagagtctcactcagtcatccaggctggagtgcagtggtgcaatctcggctcactgccacctctgccttccaggttcaagtaattctcctgcctcagcctcctgagtagctgggattacaggcatgcaccaacacgcttggctaatttttgtatttttagtagagacggtgttttgccacgttggccaggctggtctcgaactcctgacctcaagtgatctgctctcctcagcctcccaaagtgctgggattataggagagagccaccgcgtccagcctacaaaagaaaaatttaaaaatcaaccgggcatggtagcacacgccaagccactcatgagctgagatgggaggatcacttgagcccaggaggttgaggctgcagtgagctgtgatcatgccaccacactccagcctcggcgacagagcaagacccca[134 bp omitted]ccccgtgtctactaaaaatacaaaaattagctgggcgtgacggcaggtgtctgtagtcccagctacttgggaggctgaggcagcagaattgcttgaacccaggaggcagaggttgcagtgagccgagattgtgccactgcactctagcctgggcaacaagagcgaaactccatctcaaaaaaaaaaaaaagaaaagaaagaaagaaagaaaacatgaatgaatggccgggcactatggctcacacttgtaatcccagcactttcggaggctgaggaaggcagatcacttgaggttgggagtttgagaccaggctggccacctcacccaatgggatggctccgggaggttccagtgagccgagatcacgccactgcattccagcctgggtggcagagcaagactccatctcaaaagaaagaaagaaggaaagaaaatgaatgaatacaatagtgacaaatgggacaaagggggtcgtggggcccaggcggagggagcggcatccgcggcgttttgaggtggtgggtgtggtgggtgtggtgggagggcggcccgggcggccaccgtgacctggaagcagcgtctcaccgccgcctgccttctgccccagctgagcagcccagccaacctcagtgcctccgtcgccacagtccagctgccacagcaggaccagccagtgccccacggcacccagtgcctggccatgggctggggccgcgtgggtgcccacgaccccccagcccaggtcctgcaggagctcaatgtcaccgtggtcaccttcttctgccggccacataacatttgcactttcgtccctcgccgcaaggccggcatctgcttcgtaagtaaccgtgcccccaccccgggcaccgggctgccatgaggggaggagggcggcggccagggttccacgccacctcttagctgtgtggcttcatgctgtgcctcagtctccccacctggaaggtgggcacacccaacacccaacgggcaggctcagcggggtgggggcgctcacattgcacctggctgcttgggtgggtctgggggttccctgccccccactcccctctaggaccacaggaaggtgtgggagacccatccgccctcaccggcggccccttccagaatccaggactccaggtatccagcgggaggcccataaatgcccagttcctacgaaagacctcagcccctccctgctcacactttttgtttgtttttgagacggagtgtcgctctgttgtccaggctggagtgcagtggtgagatctcagctcactgcaacctccacctcccaggttcaaggtattctcctgcctcagcctcctgagtaactaggtgcacaggtacctgccaccgtgcctggctaatttttttggtatttttagtagagatgaggtttctccatgttgaccaggctggtcttgaactcctggcatcaagtgatgcctggctggtgctcacacattttaaagaaaattccaggccagcagtggtggctcacgcctgtaatctcagcactttgggaggccaaagcggaaggatcttttgagtccaggagttcaagaccagcctgggcaacatagcagggtggcatctctacaaataatttaaatattagctgggcatggtgatgtgagcctgtaggcccagctactcaggaggctaaggcaggaggatcacttgagcctggggagttcgaggttgcagtgagctatgattgtgccactgcactccagcctggagaacagagcgagaccctgtctcgagagaaagacagccagctactcgggaggccgaggcaggagaatcacttgaacccgggaggcagaggttgcagtgagccgagatcacggcactgcactccagcctgggtgacagagcgagactctgtcgcaaacaaaacaaaaacaaaacaaaacaaaacaaaaggagaaagaaagaaagagatagagagagaaagaaagaagaaagaaagaaaaagagagaaagaaagaaagaaagaaagaaaaagaaagagagagagagagagagagagagagaaagaaagaaagaaagttccatattggaagcattttattctgaaacagctgtggctaccccagcccccttcctggctgcctggggccagcccgggtgactggctgtccccatcctcccgggagactcaggtggcccctgatgggtgactggccgtccccatcctccagggagactcaggtggcccctgatgggtgactggccgtccctgtcctccagggagactcaggtggccccctgatctgtgatggcatcatccaaggaatagactccttcgtgatctggggatgtgccacccgccttttccctgacttcttcacgcgggtagccctctacgtggactggatccgttccacgctgcgccgtgtggaggccaagggccgcccctgaaccgcccctcccacagcgctggccgggaccccgagcctggctccaaaccctcgaggcggatctttggacagaagcagctcttccccgaacactgtggcgtccgggacggccccacccgtccccccacactccctcccacggggctccgggagacaggccggccctgcacctcaccccaccgtgacctcaataaacgttgaaactccccctggctcctgtctgtccttcccatatagggaggggagggggaactgcccaccgtgacctcaataaacgttgaaactccccctggctcctgtctgtccttcccatatagggagggaaccagggagaggtcccctgggttcaagtccccgagccccaaactcaggatggggggagtcggagcgggggatgggggcccaggttgcagggggtctctctcctggatgctcgtggctgtgggttctaacccggccccatcagggtggccctgggcaggttgttattcatctccgtgcctcagtttcctcatctggaaaatggactcgccccagacgtttcctagaactgtccctgctggctcagggactccttgaggaaggggatggggatggggaagcagcctggggggcttcctggaggaggtggcagtgccagagctgcatatcaaggtgtgaacagaaacatccgaagggctgccaggcagggggcacagtccaggcagagacctgagggctagaggccaggggacggggaggagggcaggcaggggagggatgtgggtgcaggggaggggtaatggggttggagcgctatttctcgtaggaggggtaggcagggcaggagttccctggtagaagcatgagcaatgaactgggtgggggggtggccagaggggaggtccgaggcggggaagaggtgggactcacagtccagctcaaagacgggcaagtggccactagaaggaggcattagccacagagaggggacgacctgctccaggacacgtgtagagaagaaatgaagctcattgctggtgttttttttttctttttaatatttttttgagacagagtctcgctctgtcacccaggctggagtgcagtggtgtgatctcggctcactgcaagctccgccacccgggttgaagcgattctcctgcctcagcctccggagtagctgggactacaggcacagaccaccacgcccagttaatttttatatttttagtacagacagggtttcaccacgttgtccaggctggtctcgaactcctgacctcaggtggtccacccgcctcagcttcccaaagtgctgggtttacaggcgtgagcctacttacttatttacagctggcctacttatttatttttgagacagggtctcactctgtcgcccagtctgtagtgcagtggtgcaatcttggcttaccgcagcctcaacctcctgggctcaagtgatcctcccacctcagcctcccgagtagctgggactacaggtgccaccacacccagctattttcttagtttttgtagagacggggtctggctgtgttgcccaggtgggtcctcagtgactctttacatatgaacacctccaggtcactgtaatcttagcaatctcctggcctcccagaagaccccacgtccccctcggagtctacacccgctgtgaccataacacccctaccttccctgccacagttaatggtgaaccagctct[137 bp omitted]tgcctcagtctcccgagtagccgggattacaggcaggtaccaccacgccaggctaattttgtatttttggtagagacggggtttgtccatgttggtcaggctggaattcccaacctcaggtgatacacccgcctcagcctcccaaagtgttgggattacaggcctgagccaccgcgcccggccagacaacactttcttagctaagaactttatgaacgtgaatttatttcatcctcttgacaggtttatgtgatggatcctacgattataattttacagaggaggaaactgagtcacggagagtttatttcaggggcctgaagttacacagtggccaaatggccacaccagaaccaggatatgaacccagcgtcggcacacttaataatgactgcacgtgagaatgtagtatacagctggtgctcaataaatgcagctgacgccaagtctgatctccgtgctggaggccaagccccttccaaagatacggcgtcccccacccctgaaatccccccacccccgacttgaaacagggctgtgtagacagtaggcgcttactaagtgcactgtggtgatgttaaggcagcaaggtgggaaccctgccaaaaggggaggggagaaggcagggtagtgtgtgtctgattaagctgaggacagggcagacatggactgagcgcctgctgtgtgccaggctctgggagggcagggccattgtctccctaacccgagagccatgggggtccacttgcctgtggtcacgtcaggactccagcctggcccaggctctgcgtgtccccgggtgccctcgccccgcctattcctggagacaggcccgttggttcccttcccctccccttgtcctggagccaggaggacgttggttcttgcgacagccttggcccggccgttgcagctggaacatcgtgggggagatgggaagaggaacggggcccggagcccggggctgggtcctgggaatccctttcccgcagctgggactccagctcccctgccagttcctccaggcggaagccctcaggcttggtcctcactccagcctcccggcctggacaggaattctctctccagcagccctgccagatgcccgcccagcccctgcctcaggcggggagggcttcagggaagctcaccaaggcagaagggcgggagagattgtcagagccccagctggtgtccagggactgaccgtgagcctgggtgaaagtgagttccccgttggaggcaacagacgaggagaggatggaaggcctggcccccaagaatgagccctgaggttcagggagcggctggagtgagccggccccagatctccgtccagctgcgggtcccagaggcctgggttacactcgcagctcctgggggaggcccttgacgtgcctcagttcccaaacaggaaccctgggaaggaccagagaagtgcctattgcgcagtgagtgcccgacacagctgcatgtggccggtatcacagggccctgggtaaactgaggcaggcgacacagctgcatgtggccggtatcacagggccctgggtaaactgaggcaggcgacacagctgcatgtggccggtatcacagggccctgggtaaactgaggcaggcgacacagctgcatgtggccgtatcacagggccctgggtaaactgaggcaggtgacacagctgcatgtggccggtatcacggggccctggataaacagaggcaggcgacacagctgcatgtggccggtatcacggggccctgggtaaactgaggcaggcgaggccacccccatcaagtccctcaggtctaggtttggcaggtttggcaaaaacacagcaacgctcggttaaatctgaatttcgggtaagtatatcctgggcctcattt[134 bp omitted]gaggcaggcggatcacccgaggtcagatgttcaagaccagcctggccgacagggcgaaacactgtctctactacaaatacaaaaattagccgggagtggtggcaggtgcctgtaatctcagctattcaggaggctgaggcaggagaatcacttgaacctgggaggcggaggttgccgtgagccgggatcacgccaccgcactccagcctgggcgatagagcaagactctgtctccaaaaaaataaattaaaaaacccacattgattatctgacatttgaatgcgattgtgcatcctgaattttgtctggaggccccacccgagccaatccagcgtcttgtcccccttctcccccttttcatcaacgccctgtgccaggggagaggaagtggagggcgctggccggccgtggggcaatgcaacggcctcccagcacagggctataagaggagccgggcgggcacggaggggcagagaccccggagccccagccccaccatgaccctcggccgccgactcgcgtgtcttttcctcgcctgtgtcctgccggccttgctgctggggggtgagtttttgagtccaacctcccgctgctccctctgtcccgggttctgttcccacctctccatagagggccccaccagtgtgggtccctcatcctcacaggggaggtgccagctgggacaaggagaccagaagagactgaggttctgagcggtgaagccaccaccaggagcccagagttggggtttgaaaaccggggagggggggggggtcgcaggtcgccctctgggttcaagtccaggtctgtctgtgccttggaggggcaccgtggggaggtccctttgcctctccgtgcctcagtttcctcatctgaacaacaggggtgcgaacggccccgatcccgtgggttcccggtgggggatcccgtgggttcccggtgggggatcccgtgggttcctggtgggggatccagaggccccgtggccgggaggggacaggctccttggcaggcactcagcacccgcacccggtgtgtccccaggcaccgcgctggcctcggagattgtggggggccggcgagcgcggccccacgcgtggcccttcatggtgtccctgcagctgcgcggaggccacttctgcggcgccaccctgattgcgcccaacttcgtcatgtcggccgcgcactgcgtggcgaatgtgtgagtagccgggagtgtgcgcgcccggctcggaccccgcgtcccggtctgtgaggtgggtggggggaggccggggccggggctgctggcgggggggggtccgtccagggcccgcggggcccctcgagcaccttcgccctcaggcccgtcgccggatggggacgacaaggcgcggctgagccccgacccccggggccgcccctgagccccgcctctccctccccggcagaaacgtccgcgcggtgcgggtggtcctgggagcccataacctctcgcggcgggagcccacccggcaggtgttcgccgtgcagcgcatcttcgaaaacggctacgaccccgtaaacttgctcaacgacatcgtgattctccaggtgccgccgggcggggcggggggcgcaggggcggaggccagaggcctggggagggtggaggctgcgacggaggggcgcgtcggggccgctcgtggggacctggggtggcatcgtgggctgggtggtcccctctccgcgcctcggtctgcacctctgtgaaacgggaaaatacccgccatgggccgttgaggggttaaatgagatcctgcagggaggccccgatctgctgtcaatcaacaaacttactgagaagggaggccccgatctgttgtcaatcaacaaacttactgagaagggaggccccgatctgttgtcaatcaacaaacttactgagaagggaggccccgatctgctgtcaatcaacaaacttactgagaagggaggccccgatctgttgtcaatcaacaaacttactgagaagggaggccccgatctgctgtcaatcaacaaacttactgagaagggaggccccgatctgttgtcaatcaacaaacttactgagaagggaggccccgatctgctgtcaatcaacaaacttactgagaagggaggccccgatctgttgtcaatcaacaaacttactgagaagggaggccccgatctgctgtcaatcaacaaacttactgagattctttgtgtctctccattcaccagtcctgtggcccagggcaggggccgcctctgtctttgggaaaaggggcaaaagtccccacctttccacccctgtccgcggcttgcagttctggttatttcctgggcgccgggccccgtggctcaggcctgtcatcccagcactttgggaggctgaggcgggtggatcacgaggtcaggtgttcgagaccagcctgagcaacatagtgaaaccccgtctctactaaaatacaaaaaaaaaaaattagccgagtgtggttgtgggtgcctgtaatgccaactactcaggaggctgaggaaggagaatcgcttgaaccccggaggcggagattgcagtgagctgagatcacaccactgcactccagcctgggtctcaaaaaaaaaaaaaaagattcctccctgggaagggttagagggagagtttccttgtcactaagttttctcatagctctcacccagtgcagtggcgcgatcgcagctcactacagcctccatctcctgggctcaagccaccctctcagcttggaatggggggtagctggaaccacaggtgccaccacgtgggtccaccacgtctggctaatatatatatatacacacacacatacatatattataaataataaatatatattttatttaaataaaatatataatatttataattattttataattataataatatttatataattataaatatcatttataattataatatttattattttataaaataataaatataaaatatataaaaatatttttataaaataataaaaatatatatatacacacatatatatatattttttgagacaagtctcgctctgtcgcccaggctggagcgcagtggcacaatctcagctcactgcaacctccgcctcccaggttcaagcgattctcctgcctcagcctcccaggtagctgggactacaggcgcccgccaccacgcctggctaatttttggtattgttagtagagacggggtttaaccatgttagccaggatggtcttgatctcctgaccttttgattggcccacctcagcctcccaaaatgctgggattataggcgtgagccaccgcacctggcaatttttttttattatttttgtagacatggggctttgccacattgcccaggctggtcttgaatgcctggcctcaagtgatcctcctgcctcgccctcccaaagtgctgggcttacaagcatgagccaccgcgcccggctgtagtttttttgttaactgagcacctactgcttcctgcactcaagccacatccagggacaacctccaacgccctgagccttggtgacggctcccactctacagatggggaaaccgaggcttgccttggggagcagagtgtggggtgggtatcctgccctgcaggatcccagaaccacagtggaacctgagatggggaaactgaggcccggagaggggagggtcatcatcactgccccgtgtgacgcgctgacgatctgtccccaccgccacagctcaacgggtcggccaccatcaacgccaacgtgcaggtggcccagctgccggctcagggacgccgcctgggcaacggggtgcagtgcctggccatgggctggggccttctgggcaggaaccgtgggatcgccagcgtcctgcaggagctcaacgtgacggtggtgacgtccctctgccgtcgcagcaacgtctgcactctcgtgaggggccggcaggccggcgtctgtttcgtacgtgccctgggtgtccctctgctccccacccgctcccagcccggactgcagcaacaggcaccgtggctagaccctaggagggacttcccaaccctgacaggcggcgggcaggtgggcagggcctcgcagtccagcttccccaccttgtctgcctccacagggggactccggcagccccttggtctgcaacgggctaatccacggaattgcctccttcgtccggggaggctgcgcctcagggctctaccccgatgcctttgccccggtggcacagtttgtaaactggatcgactctatcatccaacgctccgaggacaacccctgtccccacccccgggacccggacccggccagcaggacccactgagaagggctgcccgggtcacctcagctgcccacacccacactctccagcatctggcacaataaacattctctgttttgtagaatgtgtttgatgctccttggctgtgtgattgggtgttgaaaatggtcagtaggtcgggcgtggtggctcacacctgtaatcccagcactttgggaggttgaggcaggcggatcacttgagctcaggagttcaagaccagcctgggcaacatggcaaaacccccgctccattaaaaaaaaataaataaataaaataaaataaaataaaatggtccaagcctggcccagtggcttacgcctgcaatcccagcactttgggaggccgaggctggcagatcacctgaggtcgggagttcaagactagtctgccaacgtggtgaaaccccatctctactataaatacaaaaaaaattagcttggcgtcgtggcgcgtgggaggctgaggcaggagaatcgcttgaacctgcgaggcgaaggctgtagtgagccgagattacgccactgcactccagcctgggcaacacagagagactccgtctcaaaaaaaaaaaaaaaaaaaaaaaataccggtgcggtggctcgtgcctgtaatcccagctctttgggaggcccaggcaggcggatcatctgaggtctaaagttcgagaccagcctgaccaacatggagaaaccccatatctactaaaaatacaaaattagccgggcgtggtggtgcatgcctgtaatcccagctactcgggaagcctgaggcaggagaatcacctgaattctggaaggtggaggttgcagtgagccaagatcgctccattgcactccagcctgggcaacaagagcgaaactccatctcaaaaataaataaataaataaataaataaataaataaataaataaataaatataaataataatgataataataataataaacaacaaactagaatccagagtctcttgggcatctctggagtaagccaccaccagggggcagcacagccagggcaatgga[277 bp omitted]gacctcccaaagtgctgggattacaggcgtagccaccacgcccagccctgttgttatatcattttcta[132 bp omitted]caaaaccctgtctctactaaaaatacaaaaagttagcccagtgtggttgctcatgcgtgtaatcccagctactcgggaagctgaggcagtagaatcgcttgaacccgggaggtggaggtcgcagtgagccgagattgtgccactgcactccagcctggacgacagagcaagactctgtcgcaaaaaaaaaaaaaaagcaagaaagaaagaaaaaaagaaggaaagagaaagaaagaaagaaaaagaaagggaaagaaagagaaaaacagagaaaggaaggaaggaaatgaggctaggcgtggtggctcacacctgtaatctcagcactttgggaggccgaggcaggcggatcacgaggtcgggagatcgagaccatcctggctaacacggtgaaacccatctctactaaaaatacaaaaaattatccgggcgtggtggcggacgcctgtagtcccagctactccggaggc[144 bp omitted]gtgaagagaaaagccgggggaacctcgtgtgctgctccccctggggacaatgtctgaggtcctccccacaaggtatccccatccttctggtccccgcaccatggattaatgcaacgtgaatcccgctggcccctgtggggcagatgtgaaaaatggagctacaccatgagcaggcctgcagtcccagcacttctggaggctgaggtgggaggatcacttgagccccggaggtcgaggaggctgcagtgagctatgattgcaccgctgcactcgagcctggatgaaagagcaagaccctgtctgtaataaaacaaaaacaacacacacaaatccccacctcacaaaaggccctatggcccagattctgagaagtattttattttaatttttttgtagagatggggtctcgccgtcttccccaagctggccttgaattcctgggctcaagagatgctcctatctgggtctctcaatgtgccgggatggtaggtgggagccactgtgcccggccagccctgactctgttcatcagaacctgccctcagtgaacagtttgggagggggcgtgtgatccaggctccaccaacccaaggcacccttgagacttggctggagtgaggaagaattttaggaggggcccactgagccactgggttgagtgtggggtccctggaaacacaccaggggaggctggtgaggaaagaagccatcagagaagaaaggagaagccagaagcagacactggacattgttcaggcacctggatcaagccacacctgaaggcggacatccctgaactttccatataactttcatgattcaggctccacccagtttgtctgggttttcctgtcccttgtagccagtcttcccagctgcctctgccttggcctttccaactttctattcgtcagggtgtcaagccccagaggccacagggacagagacaaaggtgtcaagtgaccttcctacccccaacagaccttctctctaatatagaggaggaaaagaagggagggtagcaggacaagaaagtgggttgtttacacgctgtggcctccagctaggattgtgaaacaccctgggggactctgggtgtggtgaagttggggccggggtgggtgcagcccccctctctgcctcctgcccatctgagggactgccccccaccagggccagcaggctgtcaggctcacagaggcccgagggtctcccagcgacttgtcgactctggtgtgagtctggcaggaggtaacccagtcccggggagggcggaggctgggcgggcgagttcccctttccccagctgggccgctgcccacccggggagcggcccgccccctccaccctcataaaagcacccccagggccctgcctgggtcagtgtctcagccacagcggcttcaccatgcacagctgggagcgcctggcagttctggtcctcctaggagcggccgcctgcggtgaggaggcctgggcctggggtgagggacagggctgtgtaggggcgtggtgctcccttccgtcacacggacggtcctccagcccctccaggtgggcaggaagggggtgtctctcctcactaatggaaggctctgaacgctgaaaaattctagaaaattcagattggaaatcggaactttctggagtcagcttttcttgcagacagagtctgaacgtctgcgtggaaaacttcatctgcgtggctgactgggctggcccaggcactggctgggtcagccccatttctcttatgtccaactggaaggcactgcgcccagggtagggcgctgggatctgcccccggtccccagcccactgtgggttctgtactctggggcattcccgcccgagggtatctgagtttgcaacgctgaggggccccaagacggaaacgggattcttttttttctttctttttttttttgatagggagtctcgctctgtcgtccaggctggagtgcagtggtgcgatctcggctcactgcaaactccgactcccgggttcaagcgattctcctgcctcagccttccgaatagctgagattataggccacgccgactaaattttgtatttttttttaaagtagagacggggtttcaccatattggccaggctggtcttgaactcct[133 bp omitted]atcccgtcaggcagcctcgcccgggggaggagtccaccccgcggccctcacgcgcccgcccacccacagcggcgccgccccgtggtcggatcctgggcggcagagaggccgaggcgcacgcgcggccctacatggcgtcggtgcagctgaacggcgcgcacctgtgcggcggcgtcctggtggcggagcagtgggtgctgagcgcggcgcactgcctggaggacgcgtgagtgcccgcgccgcgcgggggaagagcccgggtgcggtggggggagtcggctggcaccgaccgcggactccgtccggtccccagggccgacgggaaggtgcaggttctcctgggcgcgcactccctgtcgcagccggagccctccaagcgcctgtacgacgtgctccgcgcagtgccccacccggacagccagcccgacaccatcgaccacgacctcctgctgctacaggtcggccccgtgtagcgcagtccctcctgcggcgctgggatccccggcccaccctcactccaccccgcctacaccgcgccccgggtccagcctcgacctctcctgctgcatggggaccccgccccacaacccccacaccctcaccccgggtctagcctcgacctctcttgctgcgctcggagcccccccaccctctgcaccctcaccccgggtccagcctcgaactctcctgctgcatggggaccccgccccacaacccccacaccctcaccccgggtctagcctcgacctctcttgctgcgctcggagcccccccaccccctgcaccctcaccccgggtccagcctcgacctctcctgctgcatggggaccccgccctacaacccccgcaccctcaccccgggtctagcctcgacctctgcggctgcactgggagccccccaccccccgctccccctgcatccccatcccggttccagcctcgacctttgcagctgcactggtgagcctcgcacccaccccatccccacctgcacccccacccagggtctagcctaaatctctcctgctgcactgagacccacgcccctgccctgatgcccacctcccccgtcccgtctccccgagcctagcggcattctccccagcctcgcacccccgcaccccaaccctgacgtccgcctccaccctcagctgtcggagaaggccacactgggccctgctgtgcgccccctgccctggcagcgcgtggaccgcgacgtggcaccgggaactctctgcgacgtggccggctggggcatagtcaaccacgcgggccgccgcccggacagcctgcagcacgtgctcttgccagtgctggaccgcgccacctgcaaccggcgcacgcaccacgacggcgccatcaccgagcgcttgatgtgcgcggagagcaatcgccgggacagctgcaaggtgagccttcaggcctgggaggagacgcggggcctgcaggccccgggaagggcctgcagagggagcgcgaagcggggggcaagtaggaacagggcccagggaaggggcggggcgcgtagggggcgggaactggaagatgggcggagcatgagggtggcccgtgggcggggcctgtatgagggggcggggcatgtgggtagggtggggccttgggggcgaggcctggagaaggtacggggcctctggagagggtggggctgaagaagggtcagggcgggcagaaagggcaggaacgggtgggatgtggaaggacctgtgggttagggtgggaatagggggcggggctcgaggagggggcggagtccagtaatagcgggactgcaagggggcgaggccaggaagagggttggggcatgaggggcagggcatggaggaaggggcggtacctgtggggagggtggggctggagaagggtcagggcgggcaaaagggcaggtggcagagaaagggtgggaggtatagggggcgggcacgtggaggaaggggcggggcatggggacggggcggggcaggtggaaggggcgggaacctctgaaggggcagggctggtgcggagcgggatccctgctgtggcagggaagagaaggggtcctgagcagggcagaggtttaagaccagccgaggcttgcatggtagccggggccaagattgggtggggcttaagggaggggcgtggcctgaggtgagtggggactgagcagagcaggtggccactgagacgcgttagggcagaagtgggatccacggcaagtcaaagcttggaagagcaggaatgaggtgtgggacccccatactggaaagggcttggagcggggtggggtcgggggaacacgtggtgaggttgaggccagagggggtgtggccaggagctgggggcgggcctagaggggcgtggcttgtggttgtggcctaggcgataggcgtggcgcggggctattgactagtgaagaccaaattaacacgggagggatgagcgagcattgtggggcgggagcggcagccaggtgagggggtctaacacgtgaggccggggtgggcgcgggccgcccctcacggccccgtcctgttccggcagggtgactccgggggcccgctggtgtgcgggggcgtgctcgagggcgtggtcacctcgggctcgcgcgtttgcggcaaccgcaagaagcccgggatctacacccgcgtggcgagctatgcggcctggatcgacagcgtcctggcctagggtgccggggcctgaaggtcagggtcacccaagcaacaaagtcccgagcaatgaagtcatccactcctgcatctggttggtctttattgagcacctactatatgcagaaggggaggccgaggtgggaggatcattggatctcaggagttcgagatcagcatgggccacgtagcgcgactccatctctacaaataaataaaaaattagctgggcaattggcgggcatggaggtgggtgcttgtagttccagctactcaggaggctgaggtgggaggatgacttgaacgcaggaggctgaggctgcagtgagttgtgattgcaccactgccctccagcctgggcaa[146 bp omitted]accccgtgtctactaaaaatacaaaaaaaaattagctgagcgtggtggtgggcacctgtagccccagctactcaggaggctgaggcaggaggatagcttgaacccgggaggcggaggttgcagtgagctgagatcgcaccactgtactccgacctgggtgacagagcgagactctgtctcaaaacaaaaacagaaacattaaaaaaagaggaacgcgggaagctacagataaaagcgcaagaacggagaatacagcgaagttccgggtccagcgcttccgtggggctgacgcggccacacggcggcgcccttgccacacacacacacacacacgcgcgaaggcccgccaggcatgggtgtcccctcctggtctggctcataccgtttccctttgcttaccaaggggaatgtgagcgtcttctgtgtgcaaggctgtgggctgagactcaggtgcacagaaacccttcgaggccgtgttcctatgacccatatcccataaggggaaactgaggctcacagggactgtgcgactctcctgaccttacacagaagctccaggacacagcctggactggagcccagagccacggagcctgccttcacaaaccaccctgggtgcggccagacccacaccaggacgacgagcagcggcacctgcttgctggaggccctggacctcaggtcacccttcttggcaaggccagggaggacacctgaggccctgtgccctttctcccacctggtggaggggca[136 bp omitted]cccatctccactaaaaatacaaaaaaattagccgggcgtggtggcggatgcctgtagtcccagctacttgggaggctgaggcaggagaatagcttgaatccaggaggtgaagcttgcagtgagccgagatagcaccactgcatttcaacctgggcaacagaaggagactccatctcaaaaagaaagaaaaaaaaaaaaaagagaaaagaaaaagtgactgatgggccgggtgccggtg[168 bp omitted]gaggcagaatggcgtgaacccgggaggtggaggttgcagtgagtggagatcacaccactacactgcagcctgggtgacagagcgagattccatctcaaaaaaaaaaaaaagactgatgatctgagaggcaggtccgctgggaaaaggggggatggattgatgaacactgtgcttgggtgtttttggggctatggaacactcacctaggaatcacactgacgtgcaagcacgtattgagcacttactgtgtgcagagccctgggccgggcacggtaagacacatctaagccccagccctgctcttaggaatttggtaaatactgcactgcacggaagggggcccattcagccgtctggtgaccaccacgaagttggagctcactgtgtgaatttcacgtttttgtttttgttgtttttgagacggagtctctctcgtcgcccaggctggagtgcaatggcacgatctcggctcactgcaacctctgcctgatggttcaagcgattctcctgcctcagcctcccgagtagctgggattacaggcatgcgccaccacgcccggctaattttgcatttttagtagagacggggtttctccatgttggtcaggctggtctcgaacttccgacctcaggtgatccgccccccctcggcctcccaaagtgctggagttacaggcatgagccacctcgcctggccacccagctaatttttaagatttttgtagagatgaggtctcgccatgttgccccaggttggtcttgaactcccaggctcaagtgatcctcctgcctgggtctcttatggtgctggtgcgtgagctgctgcatccggcctgcctgggcatctttgcatcctttggtccgcaggagctacggagggttccggaggaggagacggtttaggaggcggtggaacaggagtggtggggaggatgcaggacgggaacatctgggcaccacatagtcctctgagttgagacgcggtccagtctccgcactgccatatatatggcctctgtttcctcatctgtatctcggggccccaacgtccctggctcttagggagattttgaggacccctgggggaaccgcgaggcgacgaggaccttgggaagccgggggcggggacagcagagcttcagggccacaggccgcctctcagcacccccatgccctgcctgcctcgcccaccccactgtacctgagtgaggtagaagctcatgacagccagcttgtgacagtggtctgacagaccccccccccacctagtgacgcaaagcccaccccggctcaagtggtcaggaactgatgggaccagggggcatcctgtccccactccacgcgtccagacctcagccaggtcaccagaaccacggggggctggggtcagctagaggcattttcacttctgagtcgggcactgggtgactctgatctcccggcccctgaagctgcccacgagcctgcgtcccacaacgcatgggcaccctcaccagtgctcccatctcctccccgtccacccgccgcaggcctgcacccctcgccagcgctcccatctcctccccgtccacccgccgcgggcctgcacccctcgccagcgctcccatgtcctccccgtccacccgccgcgggcctgcacccctcgccagcgctcccatgtcctccccgtccacccgccgcgggcctgcacccctcgccagcgctcccatctcctccccgtccacccgccgcgggcctgcacccctcaccagcgctcccatgtcctccccgtccacccgccgcgggcccgcacccctcaccagcgctcccatctcctctccgtccgcccactgcgggcccgcacccctcgccagcgctcccatctcctctccgtccacccactgcgggcccgcacccctcgccagcgctcccatctcctctccgtccacccactgcgggcccgcacccctcgccagcgctcctgcactctggtctctgcagagccacatggaaacgccgcagacacccggacaaaagccgcccccaaccacccgccagggcccactgtgttctgtctgtcacttgctttggacacccctggcatccacaaggcgccccacacatgctgagtgactgggggagatggaggcccacacactcctgagctcgagaggaggtcgcaggagtggggccgggagctgccctagggtctgtccctcagaggatggccagggggacggtgagacggggctcggtgtcccagcagagcttggagtctgcggccgaggacgggggccttaaagtgggggggccttaaagtgggggggccttaaagtgggagtgcctcagccaggtgacggggtgcctgagctcccgcctcgcgagccggcactgggcactcaccccaccctcgctgccctccccagagctgcagaaaggaggagtccgtcggcacacagcaggggcaccactgtgctgggaaggcctgctggagacggaaggcgggacccctggggacagcaacagaaacggcagaaacttggcccaggggctaagcaacctccagcagagagcagctggagaaacataacagggacagagtcaggcagagacacagaaacagcatgcagagacacagagaccatacacagagaagtgcagagataccagagacacgcagaaacaaggagagcacgcagagacagtatagagacaggcagacaacacactgaaaggcagatgcctggacagaagccaccctgacgatggccgccccatcccatccaccggcctgctgtgtcctgtccccactgctcactttggatacccccagactcggcatccactaggtgccccataaatgctgaaggatttaaagacaggccaagaggacacaggctcccggcaccaaatcgaggtcgtgggtggggtcgggggcaccgacggcagggacgcgggcctgggcgcagagggcgtttattggacctgtccttcccagccgctgcttgtccaggttcagcgctctccgcgggtgaggcaaggaaaccgaggagacgcccgagccgggtcaccacaaggtccgcctggacccccggccgtcacggacggtcctctggatgcagatggtccagggatctgggggtcctgggagagtggtgtgtggactgcgggcccagctggacaaaggcaggggcttcctcagaagctctgctggtcacgcaggcgtccggcccacggccttcaacagccctgcagggcgggctgaggttaaccgcgccgaggagagtccagggcgagcggtggctcttgcagcagccgggctcaggggcagctgaggggtagctgaggagtagctgaggggcagctgggctcaggggtagctgaggggcacccgccaccagagcccaccgcacaggcagttcttgatccagcgctgctcccactgcttcaccgccgtggttctgttgggcgacttgagcatggtgacacagccgcacctgcggggaggcaggcactgagcgggttcccacttccaggcgggcctcccttacgcctgccccacttttgcttccaggcaggtctccctctgctcgccgtccctcacgcctgctccccacgtccccacctgccacagggcctctgcccatgcttctcctccccccagcaatgctgctccctgaactagccccgccacaccaagttaactgctccacatcctgggatcctggctccaacactccctctgggacgtgctccctccaccacccttgaccgtctggagcgctgggtgggggctagaatcagctgagccatccccagcggcacatctctgggagtcagcggttccgggggcccctcacctggtgcaggccttgcattcctccgtggggcaagcgccaaggtgcagcctccgcaggtggtcgatcttgggctggcctggggccctggcgggagaggggagaacgtgagggaggcctgggcaccacgaggccaggttccggcaggggcatctgtccacaggcgggggtggagggaatggccggcctcacaccatctgccaggtgggcccagatgtctgtgaacagtgaggtgggaggtgcgggaccacctgagacaggcccagtaaagggggcgggaccccccacacggaggagggttggtctcccaggtgcctggggagcttgaggcttagagacccagtaaaggggacggggcccacacagggacgagggtcggtccgccacgtgcccggggagcctgaggtgcagggaaggtgcttgtgacgctcccatttgaggctggacagaagcaggtacatggggacttccacaccacctctgcccagacacccggcctggaggtgccgggacctctgaacgacaagattctggtggcaaaagctgccctcggtggtgggtgggggacctgggtctgggtgggggtgggccggcttattctgctctcattaaatatctgaaattttcccagtttacaagcctctgacgtaaccgtcctctctttccatcaagtcttttcctgaaacccaaaccctcgtgtgtgactcattaggaggcccctcccacagtgagcacgaggaagaaaatgctggaggtcctagagccaagccagggcgccttcccggaggtcccggagccaagccgggggtgccttccctggaggtcctggagccgagccggggccttccccggagcagggctgctggaggttcacttcattttcttccttttgctcatctgtgttttctaaaattccagccctgagcaatcagtggctcagagggtttgcatgtgctccttgtcaaacgtgtgtctgaaacaggctgggggtctgacgggcctgggttcaaatcctgactcggccacttcctgaccgcgtgaccccagatgagtggggtgacaaggtcccaccctttccaggctgggtttcctcaccgtgaaatggggtgacaaggtcccacctcacagggctgctgggcagccagggtcagctcagcacacttgggttgcccaaaccccgcacattccagagaaaggccagccccgggccctgcaaggtgacctcttgcccccgggagatcctcctgatgaggtgtctgctcagcagggccctgggccatatgctaaggcgtctctctccatccacagagggatctacggcgaggcctgacatccaggggggccagagactaagggcagaggctaaggcagggcgccctgtacagcgaggccaacacacaatcaggaaacaccaaggcaaggccggggcggtggctcacacctgtaatcccagcactttgggagggcgaggcaggtggatcacctgaggtcaggagttcaagaccagcctggccaacattgcaaaaccgcctctataccaaaaatacaaaaaatacctaggtgtggtggctcatgcctgtaatcccagctactgggaaggctgaggtaggagaatcatttgaacccgagaggcagacgttgcagtgggccaagacggcactactgcactccagcctgggcaacagagtgagaccctgtcggggagacaaaaaaaaaaaaaaaaagggagagggtgaatggaagggctgggtgcccgtgttgggggtggttcgtgacacagcagaagacaccactaggggatggagttaggggcacctagaaggaagcagcagtcatggccatgactggagaacatggagggaaggagccgtatggattcgggggggtcctggggcaggacatggagggagggagccgtgtggattcggggggacccggggcaggacatggagggagggagccgtgtggattcggggggtcccggggcaggacatggagggagggagccgtgtggattcggggggtcccgggcaggacatggaggcggggagccgtgtggattcggggggacctggggcaggacatgcagggagggagccgtgtggattcgggggtcccggggcaggacacggaggaaggagtcctgtgtttggggaccaatgcagggacacacgcacctggcgaggccgtcgagctgcagggtggcagcactgccaggcagcgtgggcgcccggccaaactgcagacgaaggggctgcttgggctgcaggcggctaaccaggccgtcgctggctggcagccagtccaggctggggataagcagctggctgggcagcaggcagcattcatccaccagcgcctcgtccggctcgctcgctgggccctcatcgcgacctgcggagagaggtggcggaagtctcagcacccctgactggggcaccgcccggccacccgggacgtgctgggagcccctccagttcaggagcaccaggtcagggccccagctctgtctgcctggctgggtgaccccggggttctctcaccaggtcggggccccggctctgcctgcctggctgggtgaccccagagttctctccccgtctctggcctgtcatgagactccctcattcacttaaaaagtatgtgggaagcactgtgccttttccagacactgggatgtaagaatgacacagctcaccctcctcacatacacacaacccgacaaggagagacagcaaacaggtgcctggaagtggctgccatcccaaaagcacccacacagagcatggacctgtgctaggaactggggaaatagcagatatcaaggcagagccactgccacctgcaggggcttatgttctggcggggggctcaggcaggacttgtgttttggtagggagaggggagcggggagaggggagaggggagagcggggagaagggagagcggggagaggggagagcggggagaggggagagcggggagaggggagagcggggagcggggagcggggagaggggagagcggggagcggggagaggggaggggcgggcgggggtgcctcacagcagatccagagcttggtgagcaggcggaagagcagggacatgctgtcctgggtatccgaggtggccgtatacacgggcaggcagctgggcttcagaaggccccagatgcggatgaccaccatcaattcccgaagcatgcccagcgaggtgccgtcccgcagaaagctgtggcccggcctcagcagggaaccctgcccgaaagaggcatcggtgtggctggggcggcggggggcagatggcgatgggatgaagtgtcttggggtcggtggaaccccgaccggggggcaatgggcagggtctgggacatttgtggtggtcaggactggggtgcttctggcaccgagtgggtggatgccggggacgctgctcagagccctgcagggcccaggacagccccatttgcagagtcgtcccatccctgagagtccacaagactaagacgaggctctggctgaggccaatatccccacctgcacgtggaggagcagccgccccctcctacagctgcgggcccgggcccctggtgactgtactgggagctgagaggaccagggaagggaggccccaggggtggcccctggcagcctaaagccccacaaaaagaagagagggacttcaaaccgtccgtgatgggcgcggtggagaagggcgggccccagggcaggatgaagccgggtgggtggggcagaagaaatcacagctggggcaggacagagtgtaccggcgggggggtgggggcgaggttggagccctggtcaggggcgcacaagccgcagaactgaaggtggaggtgtggatggagacttgatttcaaggccgcccaccccaggcgcagggagctggggagggtaaggggtgggggcagcagcagcagaagcaaggcgaaccggccttcgtgtaggggtggggctgagaaggagcagggcctgggaggcggggctttgagaatgggcaggaagggtgtggccaaggaaaggcttcttacagcagaggcttcatggagaggagggctccgaggtgggggagggctccgaggtggggcagggctccgaggtgggggagggctccgaggtgggggagggctccgaggtggggcagggctccgaggtggggcagggctccgaggtggggcagggctccgaggtgggggagggctccgaggtgggggagggctccgaggtggggcagggctccgagatggggcagggctccgaggtggggcagggctaggaagtggggcagggctaggaagtggggcagggctaggaagtgggggtttaagaagagacagactcaggaagtgggactccaagtaggggtgggactccaaccaggggcggggctgaggtgggactccaagcaggggcgggactccaagtaggggcgggactccaagtaggggcgggactccaactaggggcggggctgaggtggttttgaggggcaggggcagggaagcggggtcctgatgagatgggggcccaggtggggggcggggccttaggggagagcatggcgcacctggttgggtaggctggccagcaggtacagcacgaagtcgcccacccactgcaagagctgctgcagcgcctgcagtgtgttcatgtccagcacaaattcctccgtcttgaggttgatcatgaccttgtcaatgtctacaaggagacgtgggtcgggtcagctcgggcctcttgtacacacagggtgacctaactgcacccctcggtccttcgacctgcactgagtgcccacccagtaccaggacacaaggggacccacaccgggaacgagaagggggcgatggcgttgccggacggagaggaactgggagcccactgcctgcccccccccgggggccgctgtgctcagcaccaaccagcttctctcggcctgcaggccttggcgtgggcaggtccccatgccagggccaccagtgctcaggcccggcctgctggtgcacatctgccccctgctccgaggtgaactctgtgaacacaggggcatgtccacagcgtgcagctgcagccacccccggctggcagctggcggcggttacacacccaacagatgcctctcggatggtgactagggtggtcccacagaactaaccatgactgtgcacacggctcccagctaccaggagtgccacgtgtccacactcaaccgggtactccagacaaacgataaccctaaattttttttttgagacagagtctcactctgtcgcccaggctggagtgcagtggggtgatctcagctcactgcaagctccgcctcccgggttcacgccattctcctgcctc[133 bp omitted]ggcctcccaaagtgctgggattacacacgagtcgccacgcccagcaaccctaatttttaaaagaaacagcctgccaggcacagtggctcacgcctgtaatcccagcgctttgggaggcagaggcgagtaggacaccacgtgctgggtgagcctgggcaagctgcttagcctttctgcctcagtccccttacggcaaaacggaaggaggagcagacctgcctgcacaggacccgggtgccgggtgtcggcctgggagcgtctcagcccccaggagtagagagaggtgaaaggatcgcttgagctcaggtggtcaagaccagcctgggcaacacagtgagaccctgttgctacaaaaaattaaaaaccgggtgtggtggcacgtgtctgtaatcccagctactccagaggctgaggcgagattgcttgagcccagaaggcagaggctgcgctgagctgggactgcgtcaccgtgctgcaacctggatgacacagtgagaccgtctctaaaagcctgggtgtggtgtaatcccagcctttaggctatatcccagcactttaggaggccg[135 bp omitted]gaggcaggagaatcacttgaaccagagaggcggaggctgcagtgagctgagatcgcaccactgcactccagcctgggcaacagagtaagaccctatctcaaaagagtaaaaaaaataaataaaaataaaataaatagatgaaagaaacctcgaggccccgggcgtggaaaaggacccaccgacgtcggtgatcttggtgcagatctcggtcagccggtcgccggggctcttgtcaggcgtgttgagaaagtgggggcgcagcagcgacttcagggtggagctgatggcgatgaggaagagcttggtgtggtagtcgcacacgcgggtcaccgtgcagggcgacagcttgcagagcgaggccttcatggccaggatccgggtggagaggacctgagggcaggaagccaggtcaccccaaggggccggagcagaggcgcccgccaaggctccagctgaggagaagagcagttcgactctgacaccaggcgctcggtcagctgggcaagctgcttcgcctctgcacctcagcaacctcatggcaaaacaggtgcggaagaccaggcgcacaggaccaggtgctgggttctcagctgggagcggctctgcctctggtgggggcccctggtgatgtctggagatatttttagttgtcaccactgggggtgcccctgccaagtaacgggtggaggctggggaggctgctcaacaggacacccccatcccagaggctgctccagcccccgatgtctgtggtgcctacggggagaccctggtctagagagaatgaatgaatgagctgaagcattttgggaggctgaggctggaggattcctggaggctgggagttggagagcctgtgcaacgtaggacaccccatctctacaaaaaatagaaacaactaaaaacaaaaatgaaacgcttggcacacagcgacggcccaaggagggagagggcgaggtctcgccatcactagcgctgtcactggctacggatcccagccacgctggggtttagcctcgcagcccccgcctgggtctcacgcgtttctcggcaggctgtgccgtgaatgggattttttttttcccattttatcttcgtattggtttctgatggcacagaggaaaacaagtgaagctcagagggctggtcccacgtgcagctgccggctgagctcgttagatctgaggtccttcgaggacactctgggattgcaggcacataaccacaccactgcaagggacccttctggcacgtgggcctccgtatccgctccctcctctccttccgacgggcgggtctctgtgtgttcatcttctgaccgtgtttgctgaggcctcacaccacagggccaccgggtgtgcatcctggtacccatcacattctgagaggatggcttagaaagatacctccagactgggaacactggagaggggagccgtccaggggggatcaggccttacctgtggggcttaacgtgttacagaagaaacttcccaggtaaggaaggaaactgcttctctgaggtgcagctttcctggacgggcctctgggagcacaccccacacgcagcctcacctgccacaggctacctgcccctcttgccctccgcctgccatagagcccccaacctgccgcagggaaacccctccagctgccacaacccccacatctgccgtggggacctctacaactgctgcagagacctcctccaccctccaagggaactccctccctgctgctggcactttactgaccacggggcccctgcctgccacagggacagccccacctggcacgggaccacctgccacggggcccccacctgccacggggccccacctgccacggggcccccacctgccacagggcccccacctgccacggggccccacctgccacgggcccccacctgctgcagggcagcggtctggcgcgtgtactcctcgtgcagcttctccaccaggctctgtaccatactgggctgcacgtgcagcaggatgtcccaccagtcgtagccggtcaccatgcagtactccagcaggaagagcaggtgccgcagcgccagccccacctccagcgggtggcccatggaaggtgagaggcggagcacgctcagctgccagagacagagcccaaggagagcccggtgagatggggctgcgccctcagccgggagaggaatggggccctggggctgcggcacgtgtgtggatctgtgtgcgcgcacgcccgtgtgtgggcctgtgtgcgcgcatgtgtctgtagcgtctgtacctttctgtcagggtcatgcacaatgcctctgggaacagggaaggaaacctccctgagccccgactgcactggatgccgagccaggcttacactcgtctgctttacctgaggagtctaccccgtgaaaggcggtcctctcaacagctcctagttacgaagctcctaatacgtgctgtgagccaccccactgacctcgctcaacaagacgaacccatcacacagacaaggcagcgcaggcaggggctggcgaggggcttgcacctgtggtcccttcccccgggggcgcctccctctggcaccctcccagccccagccccagccccagacccacgtgccccagcagctcgccttcccctggttgtcaatgcccaccagcccctgccccacgtgccccagcagctcaccttcccctggttgtcaatgcccaccagccccagccccagccccagccccagccccacgtgccccagcagctcgccttcccgtggttgtcaatgcccaccaagcccagccccacatgccccagcagctcgccttcccctggttgtcaatgcccaccagccccagccccacgtgccccagcagctcaccttcccgtggttgtcaatgcccaccagccccagccccagccccagccccacgtgccccagcagctcacctttccgtggttgtcaacgcccaccagccccagccccagccccacgtgccccagcagctcgccttcccctggctgtcaatgccccccagccccagccccagcgccacgtgccccagcaactcaccttcccctggttgtcaatgctcagcagctcaccttcccgtggttgtcaatgcccaccgagcccagccccacgtgccccagcagctcaccttcccctggttgtcaatgcccaccagccccagccccagccccagccccacgggccccagcagctcgccttcccctggttgtcaatgcccaccagccccagccccacgtgccccagcagctcaccttcccgtggttgtcaatgcccaccagccccagccccagccccagccccacgtgccccagcagctcacctttccctggttgtcaatgtccaccagccccagccccggccccggccccggccccacgtgccccagcagctcaccttcccctggctgtcaatgcccaccagccccagccccacgtgccccagcagctcaccttcccgtggttgtcaatgcccaccagccccagccccagccccacatgccccagcagctcaccttcccgtggttgtcaacgcccaccagccacaaccccagccccacgtgccccagcagctcaccttcccctggttgtcaatgcccaacagccccaaccccacgtgccccagcagctcgccttcccctggttgtcaatccccaccagggccagccccacgtgccccagcagctccccttcccctggttgtcaatgcccaccagccccagccccacgtgccccagcagctccccttcccctggttgtcaatgcccaccagccccagccccagccccagccccacgtgccccagcagctcacctttccctggttgtcaatgtccaccagccccggccccggccccggccccggccccggccgcagctccacgtgccccagcagctcaccttcccctggctatcaatgcccaccagccccagccccagccccacatgtcccagcagctcaccttcccccggttgtcaatgcccaccagccccagccccagccccacgtgccccagcagctcgccttcccctggttgtcaataccccccagccccagccccagccccagccccacgtgccccagcagctcgccttcccctggttgtcaatgcccagcagctcaccttcccatggttgtcaatgcccaccaagccgagccccacatgccccagcagctcgccttcctctggttgtcaatgcccagcagctcaccttcccatggttgtcaatgcccaccaagcccagccccacgtgccccagcagctcaccttcccctggttgtcaatgcccaccagccccagccgcacatgccccagcagctcacctttccctggttgtcaatgcccaccaaccccagccccacgtgccccagcagctcgccttcccctggttgtcaatgcccaccagccccagccccacgtgccccagcagctcgcctttccctggttgtcaatgcctaccagggccacgccccagcagctcgccttcccctggttgtcaatgcccagcagctcaccttcccgtggttgtcaatgccccccaagcccagccccacgtgccccagcagctcacgttcccctggttgtcaatgcccaccagccccagccccacgtgccccagcagctcgccttcccctggttgtcaatgcccagcagctcgccttcccctggttgtcaatgcccaccagccccagccccacgtgccccagcagctcgccttcccctggctgtcaatccccaccagggccagccccacgtgccccagcagctcaccttcccctggttgtcaatgcccagcagctcgccttcccctggttgtcaatgcccaccagccccggccccacgtgccccagcagctcaccttcccgtggctgtcaatccccaccagggccagtgacgtccacgatagctgcatagcctttaagtggacggcggggcccgcggtgcgggggcgcttcatggccggctcatccacaggcctcggggccgcggagctgtagaagacggccatggtctgcagtgagagccggtgcacgatgtggacgctgccgtcgtggaaggccagggccagccctgtggggcacaggcactgcttagacatgggcagggcccaggacacgcccgccgggggaggggcctcctgctctgcagggtgtggagagccggggctgcccatccagggggtcagcccccgccaatcggcatccagcgcccgtgcccccagccactctttctttagttacacagtccctgagcaccaggggagcaggagccagcagccttggccacactgctcccagcccctccccgcccctcccagctgggcccatgtcctggctgacacgcccctcaaggagcgcaggggaggggggcactacaggtgggggaccaagggttggggctcctggcgtcccaaagagaggcatcttagggtggtgggctggggctgtcactcacactggggtctgccattgtacgagggccggggggaggtggggtccagagcccaaagctcatggaaaagagaatatgaaaggagtccctgcagtagagaggctgcaaagccgggcgcggtggctcacgcctgtaatcctagcactttgggaggctgaggcgggcagattgcctgagctcaggggttcgagaccagcctgggcaacaccggtgaaaccccgtctctactaaaatacaaaaaattagccgggcgtggcagcacgcgcctgtagtcccagctactcgggaggctgaggcaggaaggagaatcgcttgaacccaggaggcggaggttgcagtgagccgagatcacaccactgcactccagcctgggcaacagaatgagactccaactcaaaaaaaaaaagaaaaaaaaaaatagagcctggaaaatggagcataaaccaagggttttggagcagggaactgcatcccctcaacctctctgcaggctctgaggaacagccctgagccccgagcgggttttgataaatgctctttccagggaaccagggaagaacgggagctgggggaagaaagggcctgagctagggccgacttgtccacattttacagctgagcaaatagggtaggcactgaagagtgtgcagactcactcatgggcacggatgccacggtttgagctcaggaccacattatggctgctgcagcacagagaggacacatgccgcctacccaggaaggagttccaccaagttccccaggctcccttgttgatttgcaatgactctttacatattaaagaacactggatctgtctgccagcctcacagatcccgaaagatgagatctgcctcctaattgggaacccatcagaacccagaaggctgagctcctacagccccatggcctgtgctcagagcccacgtcctctggtgtgagctcccacgaccccgtggcctgtgctcagggcccaactcccctggtgtgaactgaggccccgcgtggctgccgctggctccaccgtaccgaggccagggtagaactgtgtgtcgctggccaccttgaggtcggtgttggtgagcgagatgggcagcttgggcagcgccacggccgacacacggtccagatcgttggtggccgataggatccgccatttgagaattgtgggctgtttgtcgccaactgaaaaatcaggggcaggaaaacaggaaggcaatggagtaaagacaggctgagacagccgcaggagtccagcatggcctggtgtgcaacctgcccagggcccttcccaggtctcatgccgccctgctcccatgcccagaagaccaggcccggccaatccgagcgcttcgtgcctcggccactcattggttccaggatgggcacgtgacccaaggtgggccctgggatttcatggaaacctgtgggccggcaccatctcacccccgatggggcagacagtggggagacggcgccacctcagacctgcagccatgcaaaccctaacactcgctcggccttagccagctcagccgggattcccatccctcctcatctacaattccaataaagccatgcgggatggtcgcacccacagatccgctgcctgacagcccctgcgtgaagacgcagctcctcccaacagggcagagacttctgggaatctcaggccaagccttagcaaatgtgacatggccgggcacagcagctcacatctgccaccccaagactttgggaagccaacgccagaggatggcttgagtccaggagttcaagaccagcctggacaacacagcaagaccccattctctacaaaaaaaacacagtaaacattagctgtgtgtggtggtgatgcacgcctgcacacgcctgtagtcccagctactcaggaggctgaggtaggattgctcgagcccaggaagatgaggctgcagtgagccaagatcacgccactgcactccagcctgggcaacacagcaagagcctagctcaaaaacaaaaaacaaaaacagtggcccagagagcacgtgtggggggtcctgctgtggctgcatgtgggacacggagggcagctggagccggcctgctggagcatgtgcggccagtggacaggccacgccacctcggctgctaaccgcagacacgtgggaaccaggagagcgcagctgaggcagccacagaaacagaaacagtgcagggctgctggcctgagctgctcagtttggggctggcttgttactcggctgaagctgactaccacgcagctgctctgtgccacccgcatcatgaggtctctgccccggacgggccatcacggtcacagagccttgacctcctgcaaacccgtataggggtcctgtgagcagcattccctggggggaaacaggcccagagagtggctgagacgcccagagggcacacagtggtcaggggtggctggccctcatggaattgagcctctcataggaaagacaggaaactcaacgccccagcgccgggggaggcagctgccatgacgaccacacccccagctagtggccagggtaccctcacagcacgatttacatcccctcctccatccaactgacggctgcggtcagcattcctaaatgaggggggacttgaggcagggagaagctaagctgctaagtggggatgtggggcagtgggtgaagagctgggcatggtaggaaccgaagcctggcatggtgggcacgtggggcggtgcgtgaagagctgggcatggcggggaccgaagcctggcatggtgggcacgtggggcggtgggtgaagagctgggcatggcggggaccgaagcctggcacggtgggcacgtggggtggtgggtgaagagctgggcatggcggggaccgaagcctggcacggtgggcacgtggggcggtgcgtgaagagctgggcatggcggggaccaaagcctggcatggtgggcacgtggggcggtagggggagagatgggggagagatgggtgcggtggggactgtcccagtgacccccagctgccagggatgtgagacctgagaaaggctgtggcatgtgtgtgagacgtggctctcgggcgggtaacagctgggccagcaggtgaggacggctgcaggagacgaggaggagtgtcggagcccaggactgcccagtggcttggctgtgggcagatggtagacacagacgtgcccagcgggggcaccgggcagtgaaggtgcaggtctgtgcagccacacggggtggcgccaggtgctgctgcaggagccagcgcagcccaaactgcctggtgactcaccacgaggcccaggggaaggaatgaggcccaacaaggccctggggaccgggcgaaggaacgagccctgggagaaggaatggcagcagccctcttcacctgcctggtgactcactacaagccctgggggaaggaatggcagtggccctcttcacctttactgcctctgcggccacaatgggcagttgacataaccacctgcaggccccgggagccatcggggcctcttgacacgtgctcattagtggcttctgaggagcgcctgccccacctgccccacgtgcccccacgtctggccactccagggtccattagcgctaatcggcaaatgcctgtgctctcatctaccgggaaaacatctcccttctccagagcggaggccagcctaaaaaccaggcccgcagcctccgaggctctgaaaaccaagcggctgttctggtccccggtcatagcaggcgggcgtccctgcttcgctccagccccaggattttgtgccggaggtggggatgacgggcttggctccgtgggtgcggggggcccatcgggcggatagagatgggaatgggggccccagaagaggctgctggagaggtggggtggggtggggggcgtgttctcagcagcctcagctgacccgctgagccttggcttcctctccctgaaccaggttccggaggattccgtgcaccgcccctgcccggtctggcctgtcccctgctgcccgacggccccacccacagacccacgctccacagccgcccacacgcctgcagcccctcacggtgtccccgctggctgagcaacgacacctctcagcctcggcctcgcacagaatggtggcagccgccgcagcgggcgtggaaggatggaggagtctatacgcctaacacactcagaatgctggcaggcgcgcggtcacacccgagatcctagcactactggagatcgaggcgagacgatcgcttagggccggggttcaggaccaccctgggtgacacagcaagacctgcctccaaaataaaaaccaaccgcccccgagggcaggcccagggcctccgcagccggcgggagactcacccacgggggagatctgctggaagatgttgttcacggggagtccctccttgcgcagggaccagcactccacgatgctgctggtctggctggacgcgcacaaaagcacctgcgggggaggtgggggtgagggctgacccggcactgctgtggtggccacgccaccaccggagcctgagctgcgggaccctggggccacgcactgctgggcctgtctcttcagccacgcctgcccctcgggccctcctggattccagcccaggcctgtccccagagcccaacatccactcacaggaacgcaaatgtccccggatggtgccctcccacagggacagcaaagggacacagggaaccaagtcaggggcttcaaggagtttggggcgttactgattcctaattacaacaggaatccaggcgacctggtgtggtcggctcaacagtggcccccagaacatcccatcctcagccctaggaccggtggctgggccgcctctcacagagaagggacctgcgggtgggattcggttcgggacactgagacgggagagcacgttggggggggtccgggggccccagtgtcctcacagggtcctcaggagagaatgtgggaggttgagattcagagacaggaagaggctgcgctgtggccacgaagcgggaggaaggcgccccgaaccgagggattgggcgcctccagatgctgggaaaggcagaaaatgggttctcccctggagcccccgggagggaccggccctgcccacaccacggtttagcccgtggaggcccgcgcgggtctccacccccaggaccctgagaagcagtgcttcattccaagcctgccagcccacgtgatggcctgcgcccgttcacctgctccgacatgtcccgggccaggaacttgaggtgggtgatggcgggaaacttgtccttgcggttgaggtcggtggtgcagcgcatgaacagggagggcaggatctccgtgtcgatacggcacttctcgctcaccacgctcacgcacaccttgtagaactgcacgggcgacgcgctgctgccgtccgccgtggccaccacgatgttgccgccgccggtgaaggcgatgtcggccagggccacgcggccgcgcagccggcacaggctctcggtggacgtcagcacctgcccgctgggcttcagcagggacacggtgaccaggccgctgaccgtcaccgcgatccagccctccatgggcttgccgccgaacagcgtgagcgacggtgagaacttgactcgggagaacttctccccgaagctggaggcgcccgactgtggagaagggagggagggaggaggggccgctcaggctcatgggggctgccccatgacccccagaaacacgcgcacagaagaaccacgcagaagccaggagtgtgtgcacctgggttcagatcctgactcggccacctgagccgtgtgggatgtgatcccctctgaccctccgtctcctcatctgtaaggtggaaggaacggcacctttgctttagaggacagtggggaggattaaacgggtgaacgtgtgcgcaacgggagtcacctcccctttctgtaaagggacagacagcagcatgctcggttctgggagccaggtggtccctgttgcaacgacttggctctggctctgccgtggcggcacacaggcagctggtgccaatgagccacactcacaaacccaggcgggggccgtcaggccctgggccgcactgtgcagacctgagctatagcactcaggaagtgctgtgtaagcaccagcggctgctgcgggcactatttgatttcaaatcaaatttgtcaagtcattattgacatacggaaacatccacccttctttcaacgtgagtcttttaaaagatggggtcttggctgcgcacggtggctctcgcctataatcccagcactttggggggctgaggcaggtggatcccctgaggtcagcagttcaagaccagcctggccaacacagtaaaagcctgttgctaataaaaaatacaaaaaaattagccgggcatggtagcgggtgcctataatcccagctactcaggaggctgaggcaggagaattgctggaatccaggaggtggtgattgcagtgagccgagatcacaccattacactctggcctgggcaacgagagcaaaactttgtctcaaaaacaaaaaaaaaaagaacaagaaaaatgtctctacgttgtgaaaaaatgcgaggaagagaagtgtatcatacgtatcgtacggctccattctaagttacaagttaaaaaaaaacacttcttatagcaagaagcaggtccagaagtccaggaagcaagccaggcctggtggtgaggggttgccatggcgacgactcatctggtgtccacaccacacgtctgtgtgggtcgcaggctggcatgtctgagactatgttaaaggagcacatgtgccttttattaatgtaattaaaaaacaaaaatttggccggacgcggtggctcacgcctgtaatctcagcactttgggaggccg[132 bp omitted]gaggcaggagaatcacttgaacctgggaggtggaagtttcagtgagccgagatcgcaccactgcactccagcccggttgacagaacaagactctgtctcaaaaaaaatgtatttggttattttaaaaagcgaggctctgactcaggccacagcggggatgcaccttgaggacatcacgctcagtaagagatgccagacacagaaggctacgcagtgtgtgatcctgtttctatgaatgtccaggacaggcagatccagagagacaactgggtctcgggggctggggtgggggatggatcagggtgatgcaggatggggactgggtttccttttcgggtgatgagaagggactgaagctgggcacagtgactcacgcctgtcatcccagcactttgggaggccaagacaggcagatcacctgaggttaggagttcgagaccaccctgaccaacatggagaaacccggtccctactaaaaatacaaaaaagcagccgggcgtggtggcgggcgcctgtaatcccagctattcaggaggctgaggcagtagaatcgcttgagcccgggagggagaggctgcagtgagccgagatcgcgccactacactccagcctgggcaacagagcaagaccctgtctcaaaaaacaaacaaacaaacaaaaaagataaaggtctggccgggctcgttggctcacacctctaatcccagcactttgggaggctgaggcagacggatcacctgaggtgagaagttcgagaccagcctggccaacatggtgaaaccccgtctctactaaaaaattacaaaaattagccaggtgtggtggtgggtgcctgtaatcccagctactcaggaagctgaggcaggagaatcgcttgaacccaggaggcagaggttgctgtgagccaagatcgcatcactgcactccagcctgggggatagagcgagactctgtctccaaaaaaaaaaaaaaaaaaagataaaggtctgaggttagctatggtggtggccgcacaacatggcgagtgtatacgaaacctctggaccgtgtgggctgcacactctcaatgggtgagttctaaggtctgtgaactccatcccgacaaaactgttaccaaaaacaggaaatacagacaaacggggaccgcagggtggggagtgcaccccggagggcccccgtggcacgaagccggtgctgcgtgtactgcggcaatgcgccgacaatggcagtccctggggagggactcacgaagggacgagagaaaagatcttgtccactgcatccctccaggaaggcctcctagttcctgcgagagccccagcacaagcagacgcacagaggcacgaagctggggtggctgtgaggcctttgccacgaacatccccgagaccctgccgtcagtgaggaaactgacacacagaggtgaggagtcagagcctgaacccaggtgcccccccaaccctggccacgcctactcttaactgtcccccccaaccctggccacgcctactcttaactgtccccaaccctggccacgcctacttcttaactgtccccaaccctggccacgcctactcttaactgtcccccccaaccctggccacgcctatcttaactgtcccccccaaccctggccacgcctactcttacctgtggggccgaatcacagggagcatagagaggggctctgggatgttactaaatcagagggtgggctgcattcagaagacagcagccaccagttatacatgcagctacctaaggacagtagcctccagtgaaagagataactcactaagaacggccaccctcagttaaatgaggggccactgaacacgcaggtgccaatgacagccagactgcaggtgggggccaagtgaacagccaccctcagttaaatgagaggccactgaacacacaggtgctaatgacagccggactgcaggtgggagccaagtgcaaggtccaaaaaaccaggggatgctggtgatggagaggagaggggctggcgggtggctgggtagggtgacatctcatctgcctcatccgctcactcgggcaggacactcaccttctccacgtgcagggccagtttcacaccattgtgcagccaggacagggccacaatggggtccccctccactaggctgcccactgagctctcccagctattagccaggtggtccgccatgctccagcacttgatctgcccgtcggcatctgctgacaggagccgggagcctgagggcaagaagccatcattgcgaaccttccagggatgggcagagcactgcgttgcaggacggcacagcgcctgggggaagccagcccagtggagaggtctcggcccaggtagggcacagcaggtggcacaaggcgcactccagagatgccctgagacaccctgaacaagaatgattcgggccactatggaaagagcagcaggtgcaaagctgcagaccaggggctctagacccagcgccggactccagactgaccggagaaacacagggcccccctgctccgggatccgggtcgccacccctggccacgtgggaccagcgcctcacctgactggtcccactccaggcaggtgatggcctcgtggtgctctgaggggatcgagtgcaggtcccaggggtgctccgtgtccaggatgtggatcatgcgggtcaggtctgtggggacggggcatggtcagcacggcctggcaccacagcctgcagacgatgacgatgactccaggcaggctccaggtaagccggtgtgtgtcccaccccaggaaggtcacagaactgctgtcagccgagtcgacagctcagggaacaggctgtccccccgcaggaacagagcaggcctgtgaggcgccacaactgtgtctttaaaaccagattagaagaaaatgactccgaaatgtgaacagtgggagcctctccacagcagataataggtggcttttttgcaccccgatttgattccaattttctgtggttttctagttttctctaatgaccacgtattatgagtgcctattactcaaacaatggagagaagacgggcacagccaccacgcacctttcaaaaaccagtgacacacaccgtctagaaaactggggcacgtgtctccaacaagcctccgtcaaccaacgctccagcccgattcgatcccgcacacggggcgatctcatgtctcctggcaccaggtttggggggcactgaatccaccctctgtacccccaggaggctgaggctctcacacaagttacagaggagggccagggtgagtgagaggtggcctgagagaccgagtcccttcaaggcagtgggccgggcacctggggaacagggcgggacaccatgcggccgggaggggaagcaggtgggagggggacgcaccctggtcatcgctgcgcaggtccatggtgaaggcgatgagatttcggcaggaccaggcgcaggccaggggcaccgatgggcagtgggtgctcttggaccatttctcccactcacagacgtaggccaagtccatcatcccacctgccgctggccgccgcaaatcacacatgagggcagtcaccagctcctgcgggagggaggtgtggtgggacgtctatgttggctgagcacccagggcatgtggagtgccaggccagaagtgggaaaacaatggaggcccgtggtagagggaacagccgatgcaaaggcccggaggccagacagagcctggggctggggccgagggggaacatggagaggtcagggccagtcctgggcctgtgggcttctactctcagtaaggtgggagcccgggagggctgggacctatttgggtttcaccaggacccctctggctgtctagggaacagaccatgggggccaagggcacagccgggagacgcagcggagggtctgcgctggcccaggtgagtgatgatgggggcagcaagtggacactagctctctcccgaaggaagagcccgcagacaggcaagcggtggggcggctccctgtagccgaggcggggctgagtgacagggaacacctgtggccgaggcggggctgagtgacagggaacacctgtggccgaggcgggggctgagtgtgacggggaacacctgtggccgaggcggggctgagtgtgacggggaacacctgtggccgaggcggggctgactgacagggaacacctgtggccgaggcgggggctgagtgtgacggggaacacctgtggccgaggcggggctgagtgtgacggggaacacctgtggccgaggcggggctgagtgtgacggggaacacctgtggccgaggcgggggctgagtgtgacggggaacacctgtggccgaggcggggctgagtgtgatggggaacacctgtggccgagccgggggctgagtgtgacggggaacacctgtggccgaggcggggctgagtgtgacggggaacacctgtggccgaggcggggctgagtgtgttggggaacacctgtggccgaggcgggggctgagtgtcacagggaacagagggggcacctcctcgaggctttctaagcgcctggcatccagacgggctgtttcgcttcgcaaaggcaaaagcccagggagcctggaatcacccgcaaccaggttctcctcaaaccctaaccccggctccctacttcttcagggcctgccccagacccccaaggctccgccacaagcctctaaaagtctttcagccccacccctgaccccctttgcttcccacacttcatttcaccccttgagcccacggcctcaccctaaattctcaggcttcaccgtaggggtcccatgtactctccaggtccagcctccaacgcccttagctctccaggcccaacccctaaaactccccagtccccagactccaccccggggaccccacgtactctccaggcccttcccctattgcccccaaatacgaggcttcatcccagggaccccatagcctcttcaggccccgcccctataacccccaatctccagggtccatcccagggaccccctaccctctccagacccctataactccgcagtccccagtctccaccctagggaccctattccctctccaggccccgcaccgataaccccgcagtctccaggccctgcctctacagccccccagtccccaggctccaccccggcgaccccaaacccactccaggccccgcccccgaagtcccaccaagcgccttcagcctcgccccaaactctccttaggccccgccccgaacccagccccgcgggcctcaggcctcccccaggtttccgccgcaaaccctgagccccgagccccgcgccccgcgccccgcgccccgcgccccgcgccccgcgccccgcgccccgcgccccaggccgcctacccagcagcctttgctcccggccacgcccccgaccccgcaggccccgccacggctgcgccgcgttccctcgggtccgtggacacggtcaggggtccgtccgccctcgccgggcccccgcagccccgcactcacctggtcggcccgtgcgccaagctcagcgggcgtccgcggtgcgatcttccctagcgcctcgggtctggcgccgccatcttcctcggtaacaaccagtcgcctgaggcgtggggccgcctcccaaagacttctgggagggcggtgcggctcaggctctgccccgcctccggggctatttgcatacgaccatttccagtaattcccagcagccaccgtagctatatttggtagaacaacgagcactttctcaactccagtcaataactacgttagttgcattacacattgggctaatataaatagaggttaaatctctaggtcatttaagagaagtcggcctatgtgtacagacatttgttccaggggctttaaatagctggtggtggaactcaatattcgtgctcgcttcggcagcacatatactaaaattggaacgatacagagaagattagcatggcccctgcgcaaggatgacacgcaaattcgtgaagcgttccatatttttttttttttttccattttccctcccagaaacggaatcttgctctgttgcccaggctggaatgcaatggcgcgatcttagcttgttgcaacctccgcctcccgggttgaagcgattctcctgcctcagcctcccgagtagctgggattataaacatgcgccaccacgcccggctaatttttgtattttggtagagacggggtttcgccatgttggccagggtggtctctatctactgacctcctgatccgcccgcctcggcctcccagagtactgggattacaggtgtgagccaccgcgcccggcctttcttccattttctaatgtccaagagtggggaaactgtaagcgaagtcaccgaccccgttgagtattcctacttccaaccctattcccacctcctcctccaaaagccagtttaatgcaatggatgtggtgctcttctatttttatttttattttttttgagacagggtctcgctctgtggcccaggctggagtgcagtagcgcgatctcagctcactgcaacctccgccttccaggctcaagcgattctcctgcctcagcctcccgagtagctgggactacaggcgcgcaccaccatgcccaacaaattcttgtatttttagtagagacggagtttcacca[139 bp omitted]gcccaggctgatttcaaactccaggcctcaagccctccttccaccccggcctcccaaagtgctgggattataggcgtgagccaccgcggcctcactgcatgatttttgcaagaattctgcaaatataaaactgttctaaaattacaggttaacaatggcccaaatatcagagtgttttttctggatcagggttcagttctccaagagggccacgcagtgaccttacagaaaatccccattcccaggcagcaggtagggatttaacgttcttagcggcccgggtgtggtggcacacacctgtaatcccagtactttgggaggccaaggtctgaggacagcttgagtttgagaccagcctgggaaacatagccagaccccgtctctacaaaaaaaaattaaaaattagcagggttggggagggaggggcgctgggcaaggtggttcaggcctgtaatccctgaactttgggaggctgaggcacgcagatcacctgagaacaggagttcgagactagcctggccaacatgttgaaaccacatctctactaaaaatacaaaaatattagctgggcatggtgacacatgcctgtagtcctagctactctagaggttgaggcaggagaatcacttgaacccaagaggtggaggttgcagtgagctgagatcgcgccactgcactccagcctgggggacagagcaagactctgtctcaaaataaataaataaataaataaaatagctgggtggggtgatgcacacctgtaggcccagttactcaggaggcaaaagtgggaggatcacttcagtctgggaggtcaaggctgcagtgagctgggattgtacctctgcactccagccagggcaacagagccagaccctgtctaaaaaaaaaaaaaaaaaaaaaagagaggttgaattcctaactcccactacctcagaatgtgaccttatttagaaacagggtctttgcagaggtaatcaggttaaaaggaggtgattagcatgggcctaacctaatgacgggcatcatagagatggatatttgggcacagacacgtgaggagaggacgatgtcaagacaagacataacacacagggaaaacggccacttggagatgagaccacagcaatgtggccacaagccatggacacacgaagtccccagaaaccgggaaaggcaggaaggctcctcccctagagacgctggagggagcactgccctgcagacaccatgacctcattcttctacctccagcattgtgagaggatagatttcccttttgcttctctttgacctagggtcttcctccatacccaggctgaagtgcagtggcacggtctcagctcactgcaggctcaagtgatcctcccacctcagcctcccaagtagctgggactacaggcgcacaccacaccctgctaatttttgtgtgtgtgacagagttttgctcttgttgcccaggctggagtgcaaaggtgcgatctcagctcactgcagcctctaccacctgggttcaagcaattctcctgcctcagcctcctgagtagctggcattacaggcatgcaccaccacactcggttaattttgtatttttagtagagatggggtttctccatgttggtcaggctggtcttgaactcctgaccttgtgatccacccgctttggcatccccaaagtgctgggattacaggtgtgagcagccaccatgcccagccaaccctgctaatttctctcatgttttgtagagacaaggtcttgctatgttgccctggttggtttcaaactcctgggctcaagcgatcctcctgccttggcctcccaaggtgctgggatcacaggcatgagctactgcactggccttctgtcgtttcaagccccctgtgtgagaccctccattacaggggccccaaggcactcgtacaagccactcactcaaggtctacaggggccccaaggcactcctacaagctcctcacccaaggtcacacggcaggcatgtggcagagccagggtttgaatccaggcaaccaagggcagaggagccaggggggcacctgcagcccttggtggccaggacctactaagcccccggccctgccccgaagaaaaacacacatagcccgaggccagagcaccagaaatttattaaattccccactttcccccaaaacacaattacccacacgcagcaagggggtgcggaggccccccagcctggctcctgcagcctgggccaggaggaccagcatggggacacaggagctatcaggcaggagtcaggctgggggacgaggggacacgggatggggtgacagacaaggtagtgcaagggcagaggcttctggctggaagtcctggacccccagcataaaggaggggaggaaaggaagggggctcatataaagcaggagaccctgagccccgacacaggtggcgtgggggaggacacgcagaatgacgaggataaaaccggctcttaggaccgtggcttctgtcctgggtctcagggcacacgcgcgcacacatatacaacacaagatgcttctggcatgaggggcagggtcccagagaccccaccctcattcaagctaaaaactgggaggggctgagcaggggctgggaccaagacccatgttttaccagtggggcgagtttttttggtttttctctccaaaagggaaatttaaaaatctacaacaaatcacaccaaattcattaaaagtgataaaaacccagcctccccctcctcacttgagcttcagaccgggccagaaaagctcaacgatgaagaaacaggaacatgcccaggtcaggtctccccacccaaacacaagtcccggagtgggaagcttggagctgggatggcatgggcagccccagccgccagcgtctgttgactgccaagagctgcgtgaggagggggcagagtgagagagaccaccccaagcgaaaaaggtttccgaggacaaattctaaaaatatgaaagatattttagccgaaggtatcggagggcttgatggctgggcgaggtggcagcggggtctccgcggggccgccatcagctgtgctgctccaggtaggcggacaggagcagccccggcggcaggaaatccaggtgccgattactgaccttcatctgccgcttcccctccaggtcagcacctgcagacgggaccagcggggcaagaacgggaggaatttgggagccgcggcaggtagaggtgcctcggacctgcaccaccctcgcttcttcccagggaggtcaccgccagctggtgtgtgctggtcactgcggcctggctggccctaagcccgcaggtccgggagcctggctcacaagaatacctaaggctccctacaggagcactctcctcgggcccatctcactccccgctggcactcattccactgtgcggatggggaccctgaaacgcactgggcctgaggccgcatggccactcacacgcctgcctggcggagtgtccggcctcccctcaggctccctgccctgcagaggtggctctgaggcacccaggtcctgagtggtccagctcccaccggcctccccttccccatctccccctcactgcagaaaaatgaatgacctggccaggcgcagtggctcatgcctgtaatcccagcactctgggaggccaaggcaggaggatcatctgaggtcaggaggtcgagaccagcctgaccaacatggtgaaaccctgtctctagggctgggcgcggtggcttaagcctgtaatgccagcactttgggaggctgaggcaagcggatcacgaggtcaggttgagaccatcctggctaacacagtgaaaccctgtctctactaaaaaaaaaaatatatatatatatatatacaaaaaattagcagggcgtggtggcgggcacctgtagtcccagctactcgggaggctgaggcaggagaatggcgtgaacccgggaggtggagcttgcagtgagctgagatcgcgccactgcactccagcatgggtgacagagcgagacttggtctcaaaaaaaaaaaaaaaaaagaaacccgtctctactaaaaatacaaaattagccgggcgtgctggccggcacctgggatcccagctactcgggaggctgaggcaggagaatcgcttgaacccggaggtggaggttgcagtgagtaaagattacgccactgcactccagcctgggtggcagaatgagactgtctcaaaaaaaccaaacctaaccaaccaaaacaaaaaaaaagagccacgtcccatgtgagctccgcgcctcagcagtcccctctgcctgggacccccccgtcctctactccccatcttgctgggacccctcctcttccgtgtcaggaccacagctccacacccaccaagctccaagccccgcacccccagccaaggccggatgttctgagcagaggcaggcatgggggctgcgtctcccacagagggaacagagggaggcatcgtccggttgccatggaaactgtcacctcggcaactccaggcggggcggcagagacaggtgtgagaggctcaggaccagatggggtgcctggggccggcggcgcctgcacagacgttcactacgggggtgagttctgagactgcgccccgttggaaaagtggagcgcaggggccagtagggggtctcgcctgaggtcccacgtgtggtatgtgggaggccttagagttaaatgcaaaccttccagacactgcgtccccccatcttatctctggctctgggaggtccctcaaatccaggcttcatcacccccaccccgggccccgaagatgcagatggaggagtgtctgtgtccagcagcctggttgtgtctgcggtcaccctgcgtggggccgcatatgcagggagcttctggtgaattcaaggcagggtcccactgccacccctgagttcgtagcgtccccactccagcccccttccccacctccccaccaagccccactctgaggaaccaggcccctgggaccctggccactttcccaggttgagctggccaacttggggtcttgggggccaccggcacttactggccgagatgaggtccatgtactggcagacagcgtgcagcagaagcctctcgaagctgtggggaacgggcagtgagcgccgtgcaggggctgcagcgtggggtgtccgcccacctggccgcagcctcggagggtccgctcgcctggccgcccccccttacctgttgtctagcattgctgtgtacacggcctggggggacacggagaagaaccgaagcagccgctcctcccaggtctccagcgtttcctggggagagcggcccggtggtcagggaactgcgggacctgtgggtggggggccagggaggtccagggcccccaggagcccacagcgctgggctcaaacatgacctctgacccaccacgtgaggctgcttaagtgtctctgaggccaccatgccacctcctgcctgtgccttccgtggaggaaactcctacacaccctgcagtgcccgccttcgttgcccccgccctcctactcagggccctggtgccgctgtctgtatcctgccctgtttcccctgacacgacctgcaccgggtgagaacctgtgcctgggaaacgggccttcaaaaaagaccaggcaggtagaaaagggaggcccggcaatcccccactcaccatggggatgcggctgcgcttgaggacggctcgcagacgccggctgatgcgctggaagcactcgcggggtgtataggcggggtcctctgcaggagtgggggaacaaggggcagtcttggggtgctcgtcctggccctgcccacctgccagaccacgcccacccagggaagaccacgcccatctgtgccttggcctctcctgcccaccaaaccacaccttcaacgatactgtggccccatccagccagcagaccctacccccacgaggccctgaccccaacccatccagctgaccctaccctcacctgtatgttcaccccagctagacatgaggccccacccactccaggcccacacaagccagctagccccacccctacccactgccatccagatcctgcccccacatgctggccacatccactccatgtcccgccccatccatatcctacctaccccatcctggccccacacaccccattgccctgtccccatccataccctggcctcacccacacactaggtccaacccactccaggtcccgcccacaccccatccatatcctgccccccatcgcggccccacccaccccaggcctcgcccccatcccccatccatacctgggcccaacatactaggtccaacccactccaggtcccgcccacaccccatccatatcctgcccccccatcccggccccacccaccccaggccacgcccccatccataccctggccccacccatacccgccccagccaggcccgcacctctcctccggtcctccccacggccagggcccctcctccgcgccttgctcctgccctcatcctccaggtagcgaagaacccgctcctgctcctccccggagcggttcatgaaatcgttccagacctggaagagaggcagggaggcaggcttgccatgaaacactggggctgcgctgacatccccgggcaaatgggcacggtaaggccgccaagcacgtggacgcgctcctgcggtcacctctgtccactgaggggccgctgcttgtgtcgggccctgagctgagcgcagggaagcggggaaccggggtgggcccagctgtctcggggtgggggggattgaggtgaaacactcctgcaatcgttggagggttcccaaacgtgttgggcaggtgaatccaggagctcgaaggttccaggggtggggtggggattctggcctggtctggggaccccgaaggagactgaggggccttcattaggagatcagaagtgggcgggtgcttctggcgggggacgggcacaggcgatggcctggccgtaggagaactgccggggtccccgtgtggagggagtgagggggttgggggccacacctccacataggtggcgttgttgcaggcctcggcaaagatgcctggtgatgcagggggtgccaagtccccatcctccaggccaggcaggcccccgtctgtctccagcagggtcaggaggtactgggctaggtggaaacagatgctctctgggccggggtggcatttggggacccccaggcaccatggggacccaagaactagccttcctccttttttatcatctcaacctccgcacctccatgctccaactgtcttccccagaaggtacagagaccacctagaccccaggttctggattgtcgaactcctatatatcctttaaagccccagctccaatgcccggggcgccctcccacccagccctgatccaagagtccagggggcgcctgtgtctggctctatttatatggtcccccggcctacagctgacacctctttgggtccccagccccacccaggcacagctcatgggaggggtaacagataacaccaatatgcatgccattctacaaggcccaggagcccccaggaggcgcctcccgacccctgctcactgttctccaggcgctggaggctcttccgccccttggccttgggcacgaggtctgagttccgcactgcctggttgatgaagtgctgtttccgcctggaagccgagagtctcttcacctgggagctggctagggcaggcaggcagctgggaaggggcctgtgggccggggcaggggtggtcctcagggtcaaggccggccaggatctccgagaagggccctaccacagccatggcccgcttggtttcccccagcaatggagagctcacccctacggtgtgtgaagtcctgggcccttaaaatcctattttgtttcatcctcacatcacaggaagcagatacaattgtgaagacgggctgggtgtggtggctcatgccggtgatcccagcattgtgggaggctgaggccggtggatcacttgagctcaggggttcaagaccagcctgagcaacatagcaagactatgaaaaaaaaaaaagacttatttttttgtctctacaaaaaaaaataataattaaaaaattaaccggtgtgctggtacatgcctgtagtcccagctactcaggggcctgaggcaggaggatcacttaagtccaggaggtcgaggttggcatgatggcaccactgcactccagcctgggcaacagagcaagactgtgtccaaaaaaaataaaaaaaattaggtcaggcacattgattcatgcctgtaatcccagcacgttgggaggccaaggtgggtggatcacttgaggtcaggggttgaagaccagcctggccaacagggtgaaaccctgtctctaccaaaaaaaatacaaaaattaatcaggcgtggtggcgtgcgcctgtaatctcagcttactcaggaggctgaagtgagagaatcgcttgaacccgggaggcagatgctccagtgagctgagattgtgccaccgcactccagcctgggcgacggagtgagaccttgtctcaaaaaaaaacaaaaaactgtgatgatagattagtaaaccgaggctcagagaagtgaagacacttgcccaaagtcacacagcaggtgaatgaccaagaaaagctgccgcccacccccaaccccagtgttcaaggtgttagctgtaagccagcaaggcccacagcctttgggacgtgaacagcttccttcagaaatggagagtcaagaaacttgattttatccacatcccccactcccagcagcagaggagccagaaaacagccccagaagctcaaggtgatgcctcagccccccccgcaaaccccccccttaatgtcccctgtccccagggccaggaggagagtgcggctgcagcggcccccctccagagctaatcggcctggccggagcaaatggcattaattgtggagatggattagctgtcacagctgggcctcccaccgagaatccaagggccgagccactcagtgtggggggaataggcagccgcctgggaagcgggtggttggacagggtgggggtaagcgcgcaccgcagccaccgggcacccgggaagcgggcggcgtttggggggaggtaggcgcgcaccgcagccacccggcacctgggaagcgggccggtgagggggggcctcatggatggggacttttctggcaaggaaaaaccacacaaactgggcgtgggagctcatgtaatcccagcactttgggagcccaaggtgggtggatcccttgagcctggggagtttgaggctgcggtgagctgtgactgcaataccgcgcgctccagcctggacaacaagagcaagaccgtgtctcaaaacaaacaggacgggcgcggtggctcacgcctgtcatcccagcactttgggaggccgaggcgggcggatcatgaggtcaggagattgagaccatcccggctaacacggtgaaaccccgtctccactaaaaatacaaaaaaattagccgggcgtggtggtgggcacctgtaatcccagctactcgggaggctgaggcaggagaatggtgtgaaccggggaggcagagcttgcagtgagccgagatcgtgccactgcgctccagcctggacgacagagcgagactctgtctcaaaagccaaacaaacaaaaaaccgtaatgctagctccactgggctcacaaacccccacaccacagggctgaccatggcctccagggtctgggggtaccaggatcggctccacccttatctcctaactccaccccacctgaaacacattctgctccaaccccacagtggcacctcctggccgctgctgcttccaagacacgatttcccgtcccgcctcggaccttcgcacaggcggctcgggtttgctggctggctgtaacccccaccgccggcactcacagccaagcctcgttcacaggagacgctcagaaaaataaccaccaaatcaatcctcaataaaaattctgtgattccaagagagcccacagtcgaaaatccctaatagcatccagagttcccaacacaaaaattaaaagcaacccactccacccctgcaacccccaaaagactggaaaacgctaggaaactctaggccagttgagacaagattcactcgaggcaagctgggcgcggtggctcatgcctgtaatcccagagctttgggaaggtgaggaggaaggacagcttgaggccaggagttcaagatcagcctgggcaacatcacggtccccgctgctcaggaggctgaggagggaggatcacttgagcccagaaggtggaggctgcagtgagatgagatcgtaccactgcactccagcctgggtgacagaccaagactctgtcttaaaaaagaaaaaaaaaatgcagtcaagggggtcagaaatgagggcaatgctctccagggtccacacacatgtaaagagtcctcaagccttaagtctgtgcactttacagaccagctgttacatctcaatcaaaagtaaacaagctgattggccgggcgtggtggctcacacctgtgttcccagcactttgggaggcca[135 bp omitted]gaggcaggagaattgcttgaacctgggaagcagaggttgcagtgagccaagattgtgccactgcactccagcctggtgaacagagcgagacttggcctcaaaaaaaaaaagtacgctgggcgcagtggcttatgcctgtaatcccaacactttgggaagctgaggatctcctgaggtcgggagttcgagaccatcctgaccaacatggagacacccccatgtttagtctctactaaaaatacaaaaattagccaggcatggtgacgcatgcctgtaatcccagctatttgagaggctgaggcaggagaattgcttgaacccaggagacggaggttgcggtgagccaagatcatgccgttgcactccagcctgggcaacaagagtgaaactctgtctcaaaaaaaaaaaaaaaaacaaaacaaaacaattagccaggcatggtggcatgcacctgtaatcctagctactcgggaggc[137 bp omitted]ccagggctgcctgaagcaggaaggggacgggcagataaacagcacagtctccacagactgcggcaaaaatctatgaaaagtcatcagaacaaaaatctcacatatgcacaagcacccaccaatagggacctgcaggcagaggcacgggtcaagcttccaccctggaccaggtgctcagaactcaatggcccaggcaagcctggcaactccgaaactgcctcctcgccaggctgcggcgttagcagggcaggtcctggaatctcagcccagggtgtgaaccccagctacgaagcttcaccctgaaaccccctttttttttttgagacagagtctcactctgtcacccaggctggagcgcagtggtgcgatctccgctcactgcaacctctgcctcccaggttcaagtgattctcctgcctcagcctccggagtagctgggtatacaggcg[267 bp omitted]tggatctcctgacctcgtgatccgctcaccttggcctcccaaagtgctgggattacgggcatgagccaccgcgcccggctcaccctgcaacctttaacctcagccccctctcaaaaagtgggaacaagttggtttgggaggggtactcagagccaaaagggcctgggatgaattcccctcatctcagctgccacttgcttgttttcctcctatgatggggaactcacccctcagccatgccacactgcttttgatcgtaagtgtcgctggactgagtattttccccacattgggctcatttcctgtcacctgtgctgtccccggggaggcaagttctattactttgatgcccattatacagatttggggtttttttgttttgttttgttttgttttgagatggagtctcactctgttgcccaggctgcagtgcagttgtgccatctctgctcactgcaacctccacctccctggctcaaccgagtctcctgcctcagcctcccgagtagctgggattataggcgcccaccaccacgcctggttaatttttgtattttcagtagagacggggtttcaccatgttggcaggctggtcttgaactcctgaccttaagtgatccgcctgcctcagcctcccaaagtgctgggattacaggcatgagctaccacgcccggccctcattatacagatttgtaaaccaaggcacaaagtcaccgcccaagctcccattgctgcaaagagggcagctggagaaggaggtggtggaccatgccctcagcacagagcacagcagccgacgggtactcagtgggaatacagggtcatgttaagccagcgtctctgaagctggatcagcctgaagctgcctccctgaggccggagcactctgtcccatgccccagattcacccacagccccccctgaggccccggggcctacttctccaccccagcagctggacagggccgataacagaagtgacatccgaggggagccctcggggaagtcagagggggcggggctcggtgacacagctcaagccctcccagcaaggggcctggtatcaccccatattacagatgaaggatctgaggcttggagaggtggggctgtcccccgtcaccacccagacaatgcaaggagctggatgtgaacctgggtctgacccagaaccccagagctaccctgcttccctcaccacccctcataccaaagccccacaggcctctcctccaggcccacaaggacctgcctggtccttcccctgctccagcacagcccatggctccccagcatcccagggccaggcctggctcccccttggcctagcactgcaacacgagggctttcgcctgttttgtttggtatctgagggctcgccaccctcccctgggtctctagtgctgagctgagcactggaaatcgagtcccaccatcagatggagctggctgacttcaaccagtttccagcaggaaattaagaaacatcttcaagcttgtcatcccagcactttgggaggccgaggcgggcggatcatgaggtcaagagatggagaccatcctggccaacatggtaaaaccctgtctctacaaaaatacaaaaattagccaggagtggtggcgcacgcctgtagtcccagctacttgggaggctgaggcaggagaatcgcttggacctgggaagtggaggttgcagtgagctgagatcgcaccactgcactccagcctgagtgacacagcaagactctgtctcccaaaaaaacaaaaacaaaaacaaaaacaaaaaaacatctggcctctggggtagacaggggggcctgggagtcaccgacactcctctccagaaatggaaggaacaggaagaccacatcaaaatccccatgcctggccgggcgcagtggttcacacttctaatcccagcactttgggaggctgaggcaggtggatcacttgaggccaagagttcgagaccagcctggccaacatggtgaaactcccgtctctactaaaaatacaaaaaaattatctgggcatagtggtgggcgcctgtggtcccagctactcaggaggctgaggcaggagaatcacttgaacctgggagatgaagtctgcagtgagccgagatcacaacactgcactccaggctgggtgacagaatgagactgtctcaaaaaaaataaaaataaaataaaaaataaaaaaatcccacgtccagccacaggcccctcctcacagtgctccaaactcagggagccccggtctctgcctgatgcacctgctcattccagcctcagctctgtgttcaccacccccaggaacggccccgccccccacctagcccagtcagccttaccaggaagctctggaaaccaaccggccccagccggcccgtttacttctttgctccttaatcactagctcactaggcccacagaacaagacagggtccgccccccgcccaccgccgccccccggtcctggcctgtgaccggcccacagcggcgctcactgcctgtttgttgaatgaagaactaaacttctgttgacacacctcccaagggctggttcatctgtttcccacgccactcaacaagaccactttacagacgaggaaactgaggacccagcgggggtatctgaggcttcctggaccctgaaggctcgaggatgtgtgtccacagaagaggggggcagcccaagctggggagctgctggagtttgggggaacaggcctcccggccactcccaattctactccttgcagattttgagaggggaactgtgaaccctcagtccctcgagcaaaaacacacctttcccagcactggtccctcccccaggaacccactagagacagcaagagaggaaccgacttgtgcatcaggaagccagggctcagggcggaggtgactcagcctggggtggggcagactgcggcggcccccagcagtccccaaccccccaccaggacacagctggcaggtaaacacccagagactgacggctgagagcggaaacatgagtgtatttacatagttacataggagtcactacacctgggcttcaagaccagggtgccaggcgtggtggttcacgcctgcaatcccagcactttgggaggccgaggcaggtggatcacctgaggtcaggagtttgagaccagcctgaccaacatagtgaaaccccgtctctactaaaattacaaaaattagccaggcgtggtggcacatgcctgtaatcccagctactcaggaggctgaggcaggagaatcgcttgaacctgggaggcaaaggttaccatgagctgagatcgcgccactgcactccagcctgggtgacagagcaagaacctgtccccccaacccccaccaaaaacaaaaaaaacagaagactcaggaagaagagcccattttgagggtaaatgcccacaccaggtggttcaaggcccccttagaggagacgttacgtgggtgcagtggctcacgcctgtaatcccagcactttgtgagcccaaggcaggtggattccttgagtcgaggagttcgagaccagcctaggcaacatagtaagaccctcgtctctacaacaaattaaaaaattagccaggccgggcgcagtggctcatgcctgtaatcccagcactttgggaggccaaggccggtggatcacctgaggttgggagttcgagaccagcctgaccaatatggagaaactccgtttctactaaaaatacaaaattagctgggtgcggtggcacatgcctgtaatcccagctactcaggaggctgagggaggagaatcgcttgaacctgggaggcagaggttgcagtgagccgagatcgcactactgtactccagcctgggcaacaagagcgaaaccatctcaaaaaaaaaaaaatagccggcatggtggtgcacacctgtggtcctagctactcgggaggctggggcaggaggatcgcctgagcccgcaggtggaggatgcagtgagctgtgatcaaacctgggtgatagagtgagaccctgtattaataatactactactaggccgggcgtggtagctcacgcctgtaatcccaacactttgggaggccgaggaggcaggatggcttgagcccagaagtttgagaccagcttggacaagttagcaagaccctgtctctaatatgaaaaacaaaaacaaaaacaaaaaaaaagcatcctctgctccagcctggccaatagaccgagactctgtctccaatcaattaaccaatcaaccaatcaaagacgcatcctttctccttcagatacaaatcacctcggtagagatgggtatggcctctgagtggagataatagtgatgatataataaaca[140 bp omitted]ggcaaaacccccgtctctactaaaaatacaaaaaaattagccgggcgcggtggcgggcacctgtagtcccagctactcgggaggctgaggcaggagaatggcgtgaacccaggaggcggagcttgcagtgagccgagatcgccccactgcactccagcctggacgacagagtgagactctgtc[148 bp omitted]aaccccatctctactaaaaatacaacaattagctgaacgtggtggcgggcgcctgtaatcccaggtactggggaggctgccgcaggagaatcgcttgaacccaggaggtggaggttgcagtgaatgaagatcgtgccactgcactccagcctgggcgatagagcgagactccgtctcaaaatattaatactactaaaataaccaataaaacattaacgataattagtaatgagacaacggacactcctgtttgctgggcccgccgcagtgccagctcggtaacccccaccactcggagaagaggccacacttactatcccattttacagaaggggaaactgaggcatggaagcatgaaataacctgcccaggtggcgccgtccgcacacggaggaggcaggaacggaacacgcgccgcctcctcgccctccaccaacacggaccccaggggcgcaccctgggtccccgggtccctgtgcgggccggggtgacacacggctgacccccgcacagaccgccccgcttccgggtcccccgggaaggacgcgcgggctcctgcttgccaggttttaacccacaagggttgtagggatttacccaaaggagagcaaggagccgggtctgcccggaaaggcagggggcgcggacaagcccagagggcgagtggggccgggcgtgcggcagggaccaggctggagcgcatggccacgtgggtgaaccccgacccgcggacaggggcccaggaccctctggcgggaggctccatggctggcacctcggggcccggggagtgggggggcagacccgggagtgggggcgcggccccggggaggtgggggggggggtggaccagggagttggggggcggactggggaggtggggggacggacccgggagtgtggggggcggaccagggagttgggggactgaccggggagtggggggacagacccgggagtgggggcgcggccccggggaggtggggggggtggaccagggagttggggggcggactggggagtggggggacagacccgggagtcggggcgtgggccagggcagtgggggggtcggacagaggagttggggggcgggcccgggagtgggggcgcggacccgggagtgggggcgaagaccagagagtaggggcacggaccagggagttggggggtggaaccgaggagttggggggctgacccgaggagttgcggggcggacccaggaatgggggcaagaaccaggggagtgggggggtggagcagggagtggggggacggacccaggagtgggggcgtggatcagggcagtgggggggcgcggacccgggagtggggggagtcggacccgggaagtgggggcgcggaccggagagtgggggcacggaccgaggagttggggggcggacccggagagtgagggggtggacccgggaatggaggcgcggaccagtgcagtgggggggcggaccggggagtggggcgcggaccggggattagggggcggaccggggagtagggggcggaacaggtaaatggggacgtggatccgggtcccctcccccagcgagcccccggagcgccaggagggtgtccccgctgagtaacaatgaagaccccccacccagcctgggggtccacagcgggcgagaagggaaggcaggacaggctgaagccccggaagatgagcaacgggagcgaggggaacgaagggaacgaggggagggaagggaaaggaggggaggggaggcggggagaggatctcaggggagggagcccagcccgcccccggcgcccgccgcgccccgcccgcccgcgctcacagcagccgccgcccgcccggggtgccctccgccgcctccgggccgcactcggggttctccagcgcgaccatggctcgcacgctgtcgccgccgccgccgcccggcagggccttcaccgggccgggcaggaagtgacgggcgcccggaggcgggcaggggcggggcctggggctgcgcggcggggcgggggcgcccacctcccggctgccgggaacgaacgcggaaacccaggcgcgcggggaggggatccagcccctggggggacgaacggggaaaccgaggcgcgcggggcggggatccagccaacagggaacgaacggggaaaccgaggcaggcggggccgggatccagccatcagggaacgaacggggaaaccgaggcaggcggggccgggatccagcccctggggggacgaacggggagactgaggcgggaggcggggccggccacgatccctacacccagaaatctagctccgggaaggagggacacctaggcgaggggtcgaaaactcaaccacaaccctgcgtcccgatccgggctgcggactgagccaggaatccagcccagggaggcgaggagacacggacagggaaactaaggcctgagcatcgacgagggaggggacgttcttcttggaggcagaggatggcggaaattaaaactgcccgagccttccttccacctgcccctcccagccctggagcctcggctaggcaaccccttcccc[134 bp omitted]caacatgat[131 bp omitted]aaaccccctctctactaaaaatacaaaaaattagccgggcgtggtggcgggggcctgtagtcccagctactcgggaggctgaggcaggagaatggcgtgaacccgggaggcggagcttgcagtgagccgagatcgtgccactgcactccagtctgggcgaggagcgagactccatctcaaaaaaataaaataaaataaaataaagcaagagggaggctgggcacggtggctcgcacctgtaataccagcactttgagaggccaaggccagtggatcacttgaggtcaggagtttgagaccagcctggccaacatggcaaaaccctatctctactaaaactacaaaaattagccgggcgtggtggtatgcacccatagtcccagctacatgggaggctgaggcacaagaatcgcttgaacatgggaggcaaaa[135 bp omitted]gaggcgggtggatcatgaggtcaggagattgtgaccatcctggctaacacggtgaaaccccatctctaccaaaaatacaaaaaattagccgggcatggtggcaggcgcctgtagttcctgctactcaggaggctgaggcaggagaatggagtgaacccaggaggcagagcttgcagtgagccgagattgtgccattgcactccagcctgggcgacagagcgagatgctgtctcaaaaaaaaaaagcaagaaagaaagaaaaagaaagaaagagtaaggaggaaaaagaaaaggatgagaaactgtggatggactcaaaaaagcgtgcactgtgagattcctgtagataaatgtgcaaagaggtgaaaaaggacaatggagagatgtatcaggagtgactggcaggggagctgggcatcgggaatgagtggtttccccatccatcaggcacagggtaagggtagatgctcaaagaatggacctgaacatttattcgtgagagagggaggcaactccagagaacttcctgggccttcctcccattctgggttccagggcttcccttcaggggcctgggcctgtcctgtctgtaccttcttcttcttcttcttcttcttttttttttttgagagagtctcgctctgtcacccagcctacagtgatgcaatctcaggtcattgcaacctccacctcctgggctcaagtgattctcctgcctcagcctcccaagtagctgggattacaggcaccctccaccaagcccgggtaatttctgtatttttagtagagaccaggtttcaccacgttggccaggctggtctggaactcctgacctcaagtgatccacctgcctcggcctcccaatgtgctgggattacaggcatgagccactgtgcccggcctattcattttttttcctcccttttttgtctttttttatgcaaatggaagcacctttttcttcgctgtgtattactccatgatgaccaaatgtcttggactctgttgcaggatggactttgggggaacctcctggatgtcatcctggggtacacttccagctgtgggattatggagtcaaggttgtgctgaccaggctgggtggctcatgcttgtcatcccagcactttgggaggctgaggcaggaggactgcttgagctcaggagttcaagacaagcctgggcaacctagtgagatcttgtctctacaaaaaaatttaaggggggaggggggagggatagccttaggagatatacctaatgctaaatgacgagttaatgggtgcagcacaccagcatggcacatgtatacatatgtaactaacctgcacattgtgcacatgtaccctaaaacttaaagtataataataataaaataaaataataaataaaattaaaaaaaaaactttatttgcaaaaaaataaaaaataaaaaatttaaaaataaattagctggaccgggagcagtggctcacgcctgtaatcccagcacgttgggaggccgaggagggtggatcacctgaggtcaggagttcgagaccagcctggccaacgtggtgaaacctggtctctactaaaaatacaaaaattacccgggcatggtggcaggcacctgtaatcccagctactcgggaggctgaggcaggagaattgcttgaacccgggaggcggaggttgctttgagccgagatcatgccactgcactccagcctaggcaacagagcgacaccctgtctcaataatgataataaaaggccgggcgcggtggctgacgcctctaatccaccactttgggaggccgaggagggtggatcacgaggtcaggagatcaagaccatcctggctaacacggtgaaaccctgactctactaaaagtacaaaaaattagccgggcgaggtggcgggcgcctgtagtcccagctactagggaggctgaggcaggagaatggcgtgaaccagggaggcggagcttgcagtgagccgagatggagccactgcactccagcctgggcgacctgagcgaaactctgtctcaaaaaaataaataaatacataaatcagtaataataataataataatgaggctgtggcgtttgcaaggtgccctccacctggttcccgctgctagtgtccctgcgggtatcagacaccccttgtcagtcatgtgggacacattcagtcccaaaccaccagatcggggacgtccctcacctgccctgaactttccatggctctccagggtcctggggacaaacccaagctatcctcactcagggtctccgctgagggctggcctccccgccaggctgggcccaccccctggagccccagcccctacgagggtcaaagcccttcccatattcacaggccttagagttcgcgccttggctgggctcctagtccgggctgagcgtctactcgctggttaaggtcggtccttccaggtccacagcggcctccacgcggcccaccccctgcctgctccgccccctccagccccctcccgcgctctcactccgaccttgcaccgggaggagggaataggggggttgccgctgggtgaatagagggcgcgtgggcaggggagggagtggcgagcggctgccggagaggcgggaaggcaaggccaggggaggggggcacgggctataaacgctcggccgcagcggcgccggcagaggagccgccgagcccagcacagctgccctctggaccctgcggaccccagccgagccccttcctgagttccacaggcgcagcccccgggcggtcgggcggaggggtccccggggcggtgccagggcgcaatcctggagggcggccgggaggaggaggtgcgcgcggccatgcacaccgtggctacgtccggacccaacgcgtcctggggggcaccggccaacgcctccggctgcccgggctgtggcgccaacgcctcggacggcccagtcccttcgccgcgggccgtggacgcctggctcgtgccgctcttcttcgcggcgctgatgctgctgggcctggtggggaactcgctggtcatctacgtcatctgccgccacaagccgatgcggaccgtgaccaacttctacatcggtgagtgcgggcgctgcgccgcacctgctgccgtcccgggggctccgagggccgagcggcctggggcgccctctcgcgacgcatcggggccctctcggacccggctctgtcccctgcaggggtcccccccaacctcgaatcttttccctgtggtccctgcacctgaggctagaggtcgcaaactccagcgcgggcgggcccgggcgggccggagggtggggagtgtggcacatggaaacctcgacctggccactcgcggggctcgccccggtgcagcgcgggccaacggctcggtgtcagctgaacaaagggctgggggaggggctggcttggcccgcgggccttagtttgcgacccctgccccggtggctctctgagcctgtttatgcatttgtgtcctggggtcccctatcacacacagctgtgagcccagtcggtggctgctgggccggcaccattgtctccagtttgcagttgtggaaactgaggctcagagggtcaggggcctgcttaggctcccccagcccggacagggcccagcagaaccgatttctgccggaatggccaggaaatccgagccggaggcgtaatgtttgagatgtaagggggaattactagaaggcgccccaacttctccgcccgaggaggccaggggcgctgggggaggggggggcctccctgagccatcctgctggtcactcggaccaaggtgggggccaggggtcagggccaggagcgctgggcggttcccgcggccagtggcgcccacgcccagcgcccgcgcatccccaccgcagccaacctggcggccacggacgtgaccttcctcctgtgctgcgtccccttcacggccctgctgtacccgctgcccggctgggtgctgggcgacttcatgtgcaagttcgtcaactacatccagcaggtgcgctccggagcaggaggggagagggcgcacttggggacgggcgggggtgcgctccgcagtgggaggggaggggacgcacttggggacaggcgggagtgcgctccgcagtgggaggggaggggatcgtacgtggggacggggagggggggtgcgctgcggagcaggaggggagggagcgcacgtggggacggagggagatgcactcagaagctggaggggagggggcgcatggtggggcggggcaggggtgcactctggagcaggaggggaggaggcgcacgtggggacgaggagaggggatgagctccggagcggggggcgggcgcatgtggggagggggagcccacgtgggaagggaggacggaccttgggcggggcgcgaggcaacgcataggagaaccaggggctggggtgcccagcttgcgggaaggggctgggcggtggtgcagcctagaactggagtggggggcgggaatgggggagggatgcagacggggacccgggtcactggtgaggaagggctactgaggccctgaggcttcttgccccgcctgtccctccatcccacgcagcccccctgtctcagactcggggtatcagccgccccccaagggctccctcacttccccaatcctcctgccctcctctcccagtctccccaccttctgtcccctcaacccgcactggacactcctcccaggacacttcccgtgtatgtgcctgagtgttcgcacacgtagggggatcagcagggcgggcggacagggcaggctcccaaccgcgcaggtggccacacgcccggctggcggctcccgcaggtctcggtgcaggccacgtgtgccactctgaccgccatgagtgtggaccgctggtacgtgacggtgttcccgttgcgcgccctgcaccgccgcacgccccgcctggcgctggctgtcagcctcagcatctgggtaggtgagtacagctcaggggcctcacgggagaaggcggacacgtcctagtgccctgggcgcccggagccacctgccgcctcggtccagcatctggaaaatgggcgcaatagctctgcctgcctagggccagcgaggctgcagacggggcgcccgggcctttgcagggtggctgggtgaacgcctcccggggaggcacgtgggggaccgctggttccccgagcggggtcttcatcctggcttgtggcacaggctctgcggcggtgtctgcgccggtgctcgccctgcaccgcctgtcacccgggccgcgcgcctactgcagtgaggccttccccagccgcgccctggagcgcgccttcgcactgtacaacctgctggcgctgtacctgctgccgctgctcgccacctgcgcctgctatgcggccatgctgcgccacctgggccgggtcgccgtgcgccccgcgcccgccgatagcgccctgcaggtgcgcggcgtgggtgggaggacagcaaggctgggcgggcggggaggcaccgtggtgggaggcgccggtgggggcatctgcgcgggcagggacagcccaaggggtccaggaggggcggtgcgaggggatgagctgagccgggccccagcctttcgtctaaccaccttcacggcacccccccaggggcaggtgctggcagagcgcgcaggcgccgtgcgggccaaggtctcgcggctggtggcggccgtggtcctgctcttcgccgcctgctggggccccatccagctgttcctggtgctgcaggcgctgggccccgcgggctcctggcacccacgcagctacgccgcctacgcgcttaagacctgggctcactgcatgtcctacagcaactccgcgctgaacccgctgctctacgccttcctgggctcgcacttccgacaggccttccgccgcgtctgcccctgcgcgccgcgccgcccccgccgcccccgccggcccggaccctcggaccccgcagccccacacgcggagctgctccgcctggggtcccacccggcccccgccagggcgcagaagccagggagcagtgggctggccgcgcgcgggctgtgcgtcctgggggaggacaacgcccctctctgagcggacccggtgggaatccgagcggctccctcgggagcggggactgctggaacagcggctattcttctgttattagtatttttcttactgtccaagatcaactgtggaaatattttggtctcttgtgacgttcggtgcagtttcgttgtgaagtttgctattgatattgaaattatgacttctgtgtttcctgaaattaaacatgtgtcaacacaggactttctggatcattccagaaagtgtcagacgttttctcattgtcttgtagttgactgtcactgtgtacgattcattccacttttttttttttttttttttttgagacagtgtctcattctgtcacccagactggagtgcagtgacgcgatctccgctgactgcaacctctgcctcccgggttcaagtgattctcctgcctcagcctcccgagtagctgggattacaggcgcccgccaccacgcccggctaatttttgtattttaatagagacggggtttctccatgttggccaggctggtctcgattttcctgaccttaagtgatccccatgcctctgtctcccaaagtgctgggattacgggcgtgagccaccgcgcccggggcctcatcccacttttagagagactaaaatgtgaaaacagacagtgcaaatgcccatcaatcaacgagcagataaagaaaatgtggcgcgcgcgcacacacacacacacacacacacacacacagagaagactactactcagccataaagagtaatgaaatggcattcacacaacctggccggagttggagaccactactctaagaaactggaatgggaaaccaaacatcctatgttctcagcctcctgcctcagccttccgagtagctgggactacaggcgcccgccat[137 bp omitted]cattttcaggtgagacggcgccacctagcggccgccggcgctggccccgcccctaagagcccgccccccctcccctcccgccggccgcagtcccgcaggtgcccggcagatggcacgcgcggcccgcggaggtttcgcgccttcttttctcgcctccagaagtcccagaggtgccccgtgcccagggcgcggtgtcgctccttcggatcccaacctggacccccggttggaggtatccccgctgtgaagtggggcaatcagaggcacattgtgaattatcccggtcttaggcactttacttttgagggccccttctatgaaaacgttattcaaaatggtaatttattctacaatattcaccgtcaaagaaaaaaagaagaaaaagatactttattctgcttcatgtcctggaagaggggtaaaaatgatattttatatctgcgtcagtataaagagagatataacaggctggattcattatatatgattttttttttttttttttttgagatggagttttgttcttgttgtccaggctggagtgcagtggcgcgatcttggctcactgcaacctccgcttcccaggttcaagggattctcctgcctcagcctcccaagtagctaggactacaagcctatgccaccacaccaggctaatttttgtatttttactagagacaggatttcgccatgttggccaggctgatctcaaactcccagcctcacgtgatctgctgacctccacctcccgaggtgctgggattacagacgtgagccactgtattttattttttgagacagtcttgctctgtggcccagactagagtgcagtggtgtgatcatggctcactgcagcctcgacctcctgggctcaagcaatcctcttgcctcggcctcccgagtagctgggactacaggtgtgtgccaccacaattggctaatttttgtattttttgtagagatggggtcttgttacgttgcccaggctagtctcaaactccggggctcaagagatcctcctttctcagcttcccaaagtgctaggattacagtcttgagccacggtggtcagccttaatttttttattttataaattttttgtggagacagggtctatgcccaggctcatcttgaatacctagccttaggccatcctcccgcctaagc[133 bp omitted]cctccgcctcccaggttcaagctattctcctgcctcagcctcccgagtagctgggattacagatgcctgccaccatgtccggctaattgttttgtatttttaatagaggcggggtttcaccatgttggccaggctggtttcgaactcctgacctcaagtgatccacctgccttggcctcccaaagtgctgggattacaggtgtgagccaccaggcccagccctagtttgggctttttaacctgcagagctgtgggagcgggatctggggggttttatgaggatgtcccctacctgagtgcagagtagagaaccggtccagtgaccagcagggttgggggaggatcacgctgtttttgtgtgggggaggttcccaaagccccaggcgcccccaggagatggtctggctgggaaaccttcagagctagggctgctgtgcccccaggagatggtctggctgggaaaccttcagagctggggctgctgtgcccccggtagatggtctggttaggaaatgtttaaagctggggctgctgtgcccaatgcacagcttgagaaagagactgggagaggtctgtactgatctaaatccacactgctgcctacccctgcggggcatgagggcatctggaatatggtggagccagctagtctgcgtagacattcccggctccctctctgggctaaaaataggagccccctcactgcaggcagctgccatcctgcatcccctcacccccctgcgcggcccctttgggggaagctgcagccagctacccggatcacagcttcctcctgggaaacgggtaggggctctacccttcctgccctgggggtaattatgcccccaccctgtgcccttccctttgaacaaagggcagcctaatccagaacaggatggtgaaagggttgaattaacattggcccattttatagagggataaactgaggcacagacaggcccatgcacctgccctccaggtgcctttcgggtctgctggcctccaggtgctccatcgtaggtgggagggacttcctgcaccttcagacctgagctgggtcctggcccgagaagggggtactcccacacccctttatcccgctgcagggagcgtctctccaaagcacccccaacctggggcaggtgtctcaggcctctccatcggagataggggtggcagctgggtttggtgtttaatatagccttatggtggaggcctctcagacacctgccgccattaggttacacgtggccctggggctggaaggctggattcaggccttgttgtcgggggcagctctcctgccggcagttttttgttttgttttgtttttgaggtggagtctcactgtgtcacccaggctggagtgcagtggcgcgatctcggctcactgcgacttccacctcccggattcaagcgattctcctacctcagcctcccaagtagctgggactacaggcgcgcgccaccatgcccggctgatttctgtatttttagtacagatggggtttcaccttgttggccaggctggtctcgaactcctgacctctgatgatccgcccacctccgcctcccaaggtgttaagatgacaggcgtgagccaccgcgccggccccggttgcagttttgtggagggaggaggtgcaactaggtggaaggacagagagaaagttgcaatgccgtgtgctagtctagggaaaggggagggagacgactacaaccccgcccccaacactcaggaccggggacccgagcccgccagagaccctccacaagtgagggtcccccggggtggcccctgcccgccctccaggctcccctggggctcacgtccgggctggagcctgggcctctgcgcttagccccctggggtcgcttcccgcgcacacagctccctgcagagcacgcgtccccctcccgaccgccttccttgcaccccgctcggtgcctcagtttcctgctctgcgcagtggcgacaagaaggttgccaactacagagaggagtgagggctggagacgtgcagggacctccctggagggaggcgcggggcacgtggttgggcaagcgaccgctcagaccgtgtaagtcatcaccaccttcacgggggggtggtgggcagccgagctcccgacgctggtgacagccgggccgggcagggtcgtcctggtttcacaaaggggctccgggtcccagcgcgcacctccccacgcccgcgccgagcccccgtctgcagcccgtccctccccagagggaggccggcgggaccctggttccctccctccgacgccgcccgcccagctctgcaccgggtctttcaagcccatttctcagacttggaaacggcggctccggagagtgaagtcactctctcagggtctctccgtctaaggggcgaaggtgaaactccgagtccacgaggcccagcgtaggtgctccgtaagaagggaagagacttggtcccggatctggctccgatgcctccggccagcccgcccaggcggagccccagtcagtcccctcttcttcccccggggcgctcccgccccagcccctgcccccggcaccctctgcgcttggggccgcgtcgcgcactttgcccaccgtccctaggccgggggcggggcctcccgcggcgctgttccccttcccgtttattatttattatcctttaaaggggccgcgacctgaaaatttccgtccactctgcccggctccccagcgcccccgggctggttgcgcgtcgtcagaccgcgggaggggggcgagggggcgtgcggggaaaagtggggagccctggcgaggccctcccgcgcccgggccgcggcgctgaatcaccggccaggtatttgcatccgagagcgactcgtcccctggtgatttgtctgggggtgggggaggggcggggcgggggccggccgcgcgcggggcgcctcttaccaatcgggcggaggggtgtagacgcggacgcggctggcggctcggtgagtcggcgcgcggcacagccccgtgggtcgggggccgggagccagcggcgcgcaccggcggctggaagccaggcgggcccgggcaggccgaccccaggcgcggggcgcgcgccccactacgagccgccctgcgcggtaaggctggggagcgcgctggccgttcccagcgcgggttccggtgccggggtgggcgcagtgcgtcctggaagccaaagaagggggtccccaaagttgggcggagatgttggtgggggtcccggactgggaaggcggccctggcgggctggggttcggggagttttctctgcaccccgcttggagacttcactccccactggatcaatcgctcaggggcgagcaggggcgatcgggggtcgcgagtgcgcgcccccccctccccagcggaaggaaatggtctctgcgcgcgcgcggggggctgcaccccgatattttatttcatttttattctttctccccgaaatcagggatttattcgggagcccagagaggagggagggtagttcccggcgagcctccccagccgggctggtttatttataaagtgtccgccccagcgcagagaggggcccccgggggagacaccgcggcccccgggcgccggggtgggttgggcccgggcgcccggttcctcggcggggatacccaggaagagccccctgacccgtttcagggccccccagacacaaaagcgggcgcaggaagcgctgggagcgcgcgtttgtcaactccaacgctcggcgccggccccgggcggcgggttcaattatcttccgtttttaggcgctcgggctggaggggttcccccccccatgcaaatcggccgctttccaagaagcctttgaaatccggaccagggtttctgtcttcttatttcttctccttcttgagtttttttctcacttcctccaggcccccccaacccaggactttcttagccccctccccagctttctgccccgcccctccccctcctcttcccttcgtggagtgaggggcccctttcgccacccgcgggcccggggccttgcacaactctttaaataaccatgttttgcaaggcccgcgccgagcgggtgacctctctccggaggcctggggggaggagggtgtggcccaggatccctccgccccccacccctgcctggtccaacgaccacccagcgccccgtcccagcctctcccttggggctgtcataaaatgggggtgggggtcgaggacaaagggctcttggggggaggggtctgaagggggtgggcgtagctagtttagggttatggcggcgatgggggggcacccagccctgacctaggggggaatctgggatccccacctgccccctccaccggccccaacgtggaggtctgtcctgctcccctcccccacccggcgacccggaagggtcattaaacccagcagggctcggagcgggctggtggggggagtggcttcctttggcctcttccttctgtgcccccaaagagggggggctttgcttggagctcttccgtggggggggccttgtcttgaagttgtcccaggtgggggaggggcgacagacccgaccagaccctgagtcagaaatgccccctcagcactttcttgggttgggtgggtggggggtgacctccagcctggggatggggggctgggtgccgccctggtggcctccggaccgccaggctctcctggtcacaacccagcgctatggccctgaggtctttgtgacctgggacctctgtccccacaacagatggaacagaggctattttggaacatgccctcctcgctttctcccaggggccacccacctgccccccactgccttttcacccatggggccgaaagactcaggggtctgggtaaagggtgtctagggcagaggggccacaggactctcttgtccggtgactggggaggcttgggggtgtctgctgtgcaacactgacctgggtggggtcgggtcacaggagggatctgagtcccaggggtccctgcctcctcgtctctccaggccttgtctgcccaggagctgtgtatgagtcttgggggctcctttgccagggtaagggttgggggtggcctcctgggcccagctgcctctcgggagggtggagctttgccccctccgctgtccccatgatgtgccttccctctggggtgtcactccaggcctgttgggttctgcccggcctgttttattggcggcctgggcgggtggaggtgtggcctgggctagggggtggctcgggtgggacccaggccccaggagtctctgttcttcacccaggccattaggactggccctgggtggaaggcactctaggctgggtgagtgtgttgccgtccgagacatctggcccactcgggatcccagaggaccgggaaactccagacccctgttgccctgcagagattgtggggtctgcgtgggaggctctgtggtcacccagacctgggttcaaatcccaccgccatgtctccaagcagaggatccctgagcctcagttgtcctcaaccatgaaatgggaccgccctggtgcccccttctctgacacctgttggtgcccaccttaacctcctgaactcgattcatccctccttgagtgccatgggttgggggggtactgttacccacactgttttgcaggtagggaacctgaggtccagagaagttgtggcttgggcgttgctgttgagttgtgtgatggggggagggttagcccagggcccgtatacaacaggcgctcaatctccagtctggcctgagatgggaggatacctagatacctggaggccaggctgggccgctccaacagggactcaggcagcgactggaacttagaacccacctgactggggcccggagcccgctggccaatcacaggccaggaacgcccattcccccaccctgcttgtgaagcaataatccaagatctcctggggcagacagtctggccacagcgtgtttctctgtggccccgtgcggggcgaccttgctacccaggcccacagtaggctgtatgcgaagagcctgcgcctctgcctccaagaaggcctccaggtctgcatcctgcatgagatggacatgagagctgatccccagggccttcatggggaaggaaggagggggcttgaggagctcaggcctgctctgactgtgccttttttccccctcaggtttctgcaaatgcgtgaatgagccggatgccagcctctgtcccctggagcccagcgtgaggaagaggcatgccccatcagccttcagcttgagcccggcggcccccgcccccgccccctgccaccctgcactgccccggctcccccgcggcccccacgctgcagtgcggccgggccccctccccgcaggggccgcccccgccgcccacccctagcgcccgtggtggtggtggtggtggtggtggtggtggcccgggccgcagggccatgaaactacaggccgtgatggagacgctgttgcagcggcagcagcgggcgcgccaggagctggaggcccggcagcagctgccccccgatccccctgctgcaccccccggccgggcccgggctgcccccgacgaggacagagagcccgagagtgcccggatgcagcgggctcagatggccgcactggcagccatgcgggctgcagctgcgggcctgggacacccagccagccccggcggctctgaggatgggcccccaggctcggaggaggaggacgcggcccgggaggggacaccgggctcacccgggcgaggcagagaagggccaggagaggagcactttgaggacatggcctccgacgaggacatgtgagttggggtctggggcagggccttctgggggctgttactggctctgagtgtcactctgctcatctgcagaatgggagtaagggtcaggtcgcgggatctccttcctgtaattccagcagtttgagaggccgacgtgggaggatcacgtgggcccaggggttggagaccagcctgggcaacatagcaagaccccatctccgcaaaaaattaaaaaattagccaggcatggtggtgcacctgtggtcccagctactggggaggctgaggcaggaggatcccttgagaacagaagttgagttgtgattgtgccactgcactccagcctggatgacagagatagacccagtctcaaaagaaaaatggtttttttagccgggtgctgtggcttacgcccgtaatcccagcactttgggaggtcgaggtgggtggatcacctgaggtcaggagctcaagaccagcccggccaacatggcgaaaccccatctctactaaaaatacaaaaattagccaggcgtggtggcagaagcctgtaaacccagctactcgggaggctgaggcaggagaatggcttgaacctgggaggtgaagattgcagtgagccaagaatgtgggttttttttttttttttagacagagtcttgctcttttcgcccaggctggagtgcagtggcgtgatctcagctcactgcaacctcctcctcccgggttcacaccattctcctgcctca[221 bp omitted]ccgatggctacagcagattcagcggcaggggcagataaaatctgcagccggctggacctgcatagcgtgtgggtccccccagggctggctgagggctcacttgctgtgggatcctggcctccag[141 bp omitted]tgaggccccatttctacaaaaagtacaaaaattagtcgggtgttgtggcatgcatctgtggtcccagctactcgagaggccgaggcggaaggactgcttgagctcaggaggtcaagactgcactgagctgtgatcacaccactgcactccagcctgggcaacagagaagaccctgtctcaaaaaacaaaactggccgggtgcagtggctcatgcctgtaatcccagctactcaggaggctgaggaggagaatcgcttgaacctgggaggcagaggttgcagtgagccgagatcgtgcctttgcactccagcctgggcaacaaagtgagactgtgtctcaaaaaaaaaaaaaaaacaaccaaacaaaacctagcagca[183 bp omitted]gtggtggcgggcgcctgtagtcccagctacttgggaggctgaggcaggagaatggcatgaacccgggaggcggagcttgcagtgagccgagattgcgccgttgcactccagcctggacgacagagcgagactccctctcaaaaaaaagacaaaaaaaaaaaaacggctgccaagaaagtctaggagggtgccgtggaggggcagtggcgagggtggggcggatttcagatggcggtgggagaattctccctgtggagggaaggggaggtggagctgggacagcatgcatggtgcaggatgcaggaaccagcctgccgtaatgattccctttttttttttcccaagagagtcttgctctgtggcccaggctggagtgcagtggtgccatcatagctcactacagcctccatctcctgggctcaagggatcctcccgccttggcctcccagagtgctgccgggattataggtgtgcgccaccgtggctgcctgcgtgatgcttttcaaggccccaaaattcacgctgtagggacggcttgtgctgttctgggctaattggaaacaaagtgggcgtcacgggtgccccacgctgtgctcatgagcgctctctgcagtctgagctggcggcggccggctcttcctatttccagagagggaaactgaggctgggcggggagtgggtctttccttgggctgggacgagccagcaccttctcccctgactcctgccctctgctcaccccaggaagcccaaatgggaggaggaggagatggaggaagacctcggggaggatgaggaggaggaggaggaggattacgaggatgaggaggaggaggaggacgaggaggggctgggccccccaggccctgccagcttgggcaccacggcactgttcccccgaaaggcccagccaccccaggccttccgcggcgatggcgttcccagggtgctggggggccaggagcggccggggcctggccctgcccaccccggaggggccgcccacgtagccccgcagctgcagccgcctgaccacggcgactggacttacgaggagcagtttaagcaggtgagtgggcgcgtcccgcgtggcggctgaggcacctgctcctgggccagtggggccctttgaaggcccacgttgcacggggtgtgtgctgagccgggcgtcgagttgagagctgggggttcctgcggtagctgtgcttcctgtgcttccctcctgggcgtgggctcgaccagctggctgttcattgctctgatgtgggatgtgtgaggagcacccggccgggtaggagaaacctggggggctccacggcccccatatcggaggtgatggggcagagatggaaaggtgggcctgggagggagaggctggcgccggcccgagctgggcttgggttggaggaaccaggcctgcgggcgatgcgggcagagaggccggggccttggtgacgtggtgacttggcctcctctgtcccctggcatctgtggagagccgtggggggttgcgggctgcagctggcagccgaggggatgtgggggtggctcaggtgtggctgcaggagacgcaggagccagggcctgtgaggctccgagtgggcggttaaggctggggccggcagggggtctcagggaccccaggctgaaggaggaagtaggggccgccccagcctttccccgcaggcggccaggccagaggaagtggccgggcgggggatgctttgaagttgggccgtgctgggccgggcagatggaaaccagatggtggccaggctcacattccagccctcgtccagctgggctctgcctcgacctctgggcgcggctggggggagccacctcctcgcccggggctggagctggtctgggctcccgcagggaggtggatgatggacacgctgggacatgcctgcctcggggcagccccttcggccctgggcttccagaatccgctctgaggagcctcctaggaggggccaaggcacagacacccaggggggcctccccggggctcctgactccaggggtgccgggtagcttaaggggcggccctaaccccagcagccctcaagagacttaaggttgggctgcctggaaactcacaaatagtaaagagctgaaagccggacacggtgtgggagaatggccagggcagcggcggggactcggtggggggggggggcgtctcgctgattccaccctgctctgtgactcagtttcccactcctgcagaaggggatgctccacgggccacactgccgcgcgtcccattctgccagtgagaaaacagaggctcagtgttgggaggaggggtcttgtgatcttttctgggtttaagatgatacggatgagcatgctgagagtggattctctttaatttcattaatttaattcaccaattaatttaacattcacccaatattcgccatctgcccgggactcagcccgcagggagccctgggctggaggggcgggcaggagccggacggagacctccatccccgcagggttatagccaagccgagagggagggtcaaggccccccattcagtcggtccttcgggggtcagaggtgaatgggaccccctgaccctggacacacgccccgcccagacagccccggcctccaaggcccaaagccgatgggggagttttggggtgactggcccagaccaggcagggatgaggggccaggcgccctgaccccacagcccgcagcatgtcctgagcgaaggcaggaggcagaagccactgtctaccttgtctgggcgacaccgcgggtcagggttgtaggtgccatgtggggtttttctgcagcgggaagccgagatggggaaactgaggccagtgcagggaggggggtcactgtgtcaccggcagcctcaggtattcctggagatcctgccgccccgcacctgccccctgggtgtaccgggcagtgcagaggccctgaggtggactaaagctcggcttgtgtgtagggaccgggtgccgcctctgggtcttgcgggagacgggattggaactccgagaagatgagggcctagggatggtcgtgggcagcgggggtggggggaggcccccgccctgcagtcctgtgacttttttttctctagagaagggctttcacggtgttgcccaggttggtctcaaactcctgggctcaagtgatctgcctcactcagcttcccaaagtgctgggattacaggcctgagccacggtgcccagccagtcctgggatcttatcctgggctgttcgtggcaggtccagccgccgatgccgccgcccgcccagctggccagacacctgtgttcccagtgtcaacagtggcctgggcccaaccagcccagtcagtgttacctcccgcccggcccctactggggcccctgttgactctggcgcctgccccacccccttcctggcacgtggcaggcctggcccgctggccggccgcttggcaccgtctctgcctcttcctcccaggtcctggcagggctcggggctaacttccgcctgcaaatcctcgacagctgtgaaattctgctgtcggctgcaggtctggtgggtggccaggccgcggcggggggccgggcgcagcaggctcagggccacgggttctttccttggacacctggaaccttgctgcctggggcctggggacgtgcagttttggaggccagcacgtgtcgggcagtgattaggatctcagcctcctgatgtctgacgtagcctcctggtggcctcctgtcacccacacagcaggcccagcttctagaaagcggccacggtaggattttattggattattattatttttgaggcagggtcttactctgtcgggtaggctggagtgtagtggtgctgtcctaactcactgcagcctcgatctcctgggttcaagcgatccttctgcctcagcctcctgagtagctgcgagtacagacgggcgccaccaaactcagctaatttttgtagagacggggtcttgctat[143 bp omitted]ggagtctcgctctgtcgcccaggctggagtacagtggcgcgatcgcggctcactgcaagctctacctcccgggttcacgccattctcctgcctcagcctcccgagtagctgggactacaggcatccgccaccgcgcccggctaattttttgtatttttagtagagacaaggtttcaccgtgttagccaggatggtctcgatctcctgaccttgtgatccgcctgcctcggcctcccaaagcgctgggattaaaggcgtgagccaccgcgcccggcccgtgatgggattttacacgcacaggcggttaatcacagatcttcagctgcttaaggatttgaacctttagtctcaacaattctaataagtgttgaatgaatttgagatgaatcttaaaaaacagctttattgggctatacttcatatgccatacaattcactgttttaattgtacgattggggccaggcacagtggctcacacctgtgatcccggcactgtgggaggccgagatgggcagatagcctgagcccaggagttctacaccagcctgggcggtatagcaagaccccatctctacaaaaattagctgagtgtggtggcgcacacctgtagtcccagctacttgggaccctgaggtgggaggatcccttgagcccaggaggacaaggctgcagtgagccgtgatcgcgccaccacactccagcttggtgacagagcgagaccctgtctcgaaaaaataagaaggatagggtggg[138 bp omitted]gcagcacgcgcctgtagtcccagctacttgggaggctgaggcaggggaatcacttgaactcagaagcagaggttacagtgagccgagatcatgccactgcactccagcctgtgtggcagagagagattctgtctctaaataaataaaataaaataaaccctgaccctttaactattatccccctattctaccagcacgccccagcccctggcaaccacacatcccctcctgcctctgtggattggcctgttctggacattttatagaaatgggatcacatagctgggtgcagtgcttcacgcctgtaatccctgtactttgggaggctgaggtgggcagagcacctgaggtcaggagtttgagaccagcctggccaacacagcaaaaccctgtctttactaaaaatacaaaaattagctgggtgtggtggcgggcacctataatcccagcactcgggaggttgagacagaaccgcttgaacccgggaggcggagattgccgtgagccgagatcgcgccactgcactccagcctgggcaacagagggagactccatctcagaaaaacaagaacaaagaaaagaaatgggatcacacactgcgtggccttttgtgtctggcgtatctcactgagcgtgacgtcctccaggtgcatcagcaccgtggcctgggtcggagtctccttccttttcacggctgagtcatactccgctggatggatgtgccgtattgtgtttgcccgttccgctgttggtgaccactcgacctgtttctgccttttgggtttgtagtgctgtacacgtttttatgtgggcgtacgtttgtattacttttgggtgtgtatctgggagaattgctgggtctgctggtgactccatattcacccatcagaggaactgctagactgtttagcaagcagctgcccacgttaccttcccaccagcca[137 bp omitted]acctccacctcccgggttcacgccattctcctgcctcagcctcccgagtagctgggactacaggcacctgccaccacgcccagctaatttttttgtattttttagtagagatggggtttcaccgtgttagccaggatggtctcgatctcttgacctcgtgatccgcccgcctc[134 bp omitted]tcagcgtcccagagtgctgggatcacagacgtgagccaccgcgcccggcctgttgtcgacttttgatcctagcctccttgtgggggtggcgtggtttctcactgtggttctgattttcattcagtgtcaggatctctccctctgctttccaaagtaaagcttgctgcccatgtaacttgcagatgagctcagaggtgtaggaatgacggcactagccggtatctgttgcttcactgcgtgaagaaagtgactgagtgttttagatgggtcgtctcccagatcctcactggatcccaaggagctgccgttgaacctgttgtgcagacgagaaactgaggcatggggtgatcacatgacttgtgcacagtcgcccgggggacgtgtcagagctggaatttgacccccgggatgcacctgccagagaggacccagcggtgtgtggatggatggcccagggagctgctggtgggacggttttggggaagctcagctgcccctccgtttttctttttgtctggaatgaaagtggttagaccaggccagacctcagtgctgtcctcatatccaggcctccgggcctgacagctgggcgtgtgtgggcactggggcagggacggccaccagcagcctctcaggctcaaggccagacacacctcgctgggcccagccccagagaccgctgggtcctcaccacggtgcctgccaggcagctctcgggagtgaagcgagaccccagcaagaaacgggcatccggtttttggtctttttttggtcttttcagctcatttgttttttttaattgtggaaaatacacatagatacattattttatctctcttttttttttttttttttgagacggagtcttgttttgtcacccaggctgcagtgcaatggtgcaatctcagctcactgcaacctctgcttactgggttcaagtcattctcctgcctcagcctcccaaatagctgtgactacaggcgcgtgccaccacacctggcctatttatttatttatttatttatttatttattattattattttagacggagtcttgctctgtcaccagcctggaatgcagtggcgccatctcggctcactgcaacctccgcctctcgggttcaagcaattctcctgcctc[134 bp omitted]gcctcccagagtgctgggatgacaggcctgagccaccgcgcccggcctctcgatacacttttggttccagaagtaacacttgacactcttcttgcagagaggaagaaaatggaacgtttacagggagccccgagtccctcccttgacctctagggcatgagccgcatgttctccaggcctttctctgcccactcacacccaggaatgtgacctgggaggtatctaacgtgtgatcttccgggcaggtcgggaggttcctcccgccgctgccttcgaggagctgtttatcttgggtgcgttcgcgtcgtaattgggatgttccgagccacctggttcttttcagctgtatggacgttcccctcgtggcgctggacacccccacgtccacacacttccctcggtcatttccctgttgtaagcaatactgtaacgaacatcttcggggcgtgagagttgcttggagcagtgtggggaggaggtggggagctggaattgccagggctctgggagaatcggcaacacgttttcttcgtcgtgccccggagacccccagactggtgggagacagagctggatgtgaaggtagcactggggtctgccgtggcctcgccacgtccatttcagactgaggcttaggggcgctgctgggcttccccacatccctcgaggggtcagggctgggctagaggggattgagggggaggctgccaagaggaaggggcattggggctggggctttgcaggatgtgtaagagtttgttagcgagccacagcagggcagggcctgcctctgggatcactgtgactggagcgtaatgtgtggggccagggtggccaactttttggcttccctgggctacattggaagaagaagaattgtcttggaccacatgtaaaatacagtaacactaatgatacctgatgagccaaaaaaaattgcaaaaaaactctcatcgtgcgctaagaaatgtacgcgtttgcactgggccgcatttacagccgtcctgggccgcgggtcagtcaagctctcggtgtagcaggaggggtgggcagagcttgagggcacttggcagggtttggagctgggagaaggaggctgggaggacccttctggagcctgttttggagacagaacggaggcacccttggtccaggcaggagtagaagaggccaacactgcagctgggcttctggggcctgagaagaaggagaaggaggagaattttcccagcacaggcgggtgctctaggcagatggtgcagctggggcctttgcccagaggtcaggcagcaggttccgagcacacagaggcagcggctgtgtttgagacagagtgtgtttgtcaagagagccccgagccaggccctcggccgccagccctggtgccggcgtcttcctgggcctccgggagccccggctgcacgtgagccgccgggagggctgtcgggaagccccctgggcacctggtcctccccaccggggcagcgcccgcctcatcaaagccactgtggctgctggcgccgggccagctgggccctggcgggcgaggggtgggtgggtgcccgccagcccctggcactgtgccccggcccgtgcccgtgccaggagcgtcgctgactcagccggaagagccttatctggcccctgcgccaccgcctggccgtcgggtcaccgccgcggggtcaccgccgccgcggcctggccccacgcccaccgccggcgtcccaccctggtggctgctgccaagcgccggccccgccccatgctttctaataacacacgcggcagcccgagggagcggtgcccgcaggcagagagtgtccccgcgtggtgcctgggcgggggaatgggcgtggtgagccgccgtggcgtgcgtgcgagtgtgcacgctggggctgtggccgggcggctcgtgggtcctgtctcgtgggaccctgcctgggagggaatcttgctccagacacagcatcttcggaccctccaaggcctctgcccaccgggcacctgctggattctgtgggtctcgtgtgtggggctgtgtgcacccagccagcggcacctcacgcgcccgcctgcgtgtccccagccagcaccacggtgttcgtttaggtctctgtgtgccgagtgacgtggcaaacttcccacgtccctgttttgcgtggacctgttggtgagtgtgtccagacgtgtgtctgccctgacgtcctttgtgaatgtctatgttggggtgatgatctcctgtgtgtgcatttttttaactataaagatggggtcttgccatcatgttgcccagcctggtctcaaactcctgggctcaagtgatcctcccgcctcggtctctgaaagtgctgggattacaggcgtgagctgctgtgccggactggtctcttgtgttttgtgtggatgtggctgtgtgtgtgtgtgtgtgtgtgtgtgtgtcaggggtggctgcaagcgtatgtgtgtgtgcacgtcgaggctggagagtgtgtgtccaaaagcgtgcctgcttgggctcgccacgtgtgcgcacgtgtgcccgtgacagacgaccttcctgtgtgcctgagcatttgggagcctcgtgctggaccctgaagcatgaggtcgcggtggggcctattaaccattagacccccggggctgctagagagtggcgctgtctgtcttggtcagcagcgcgcgtcggccgcggggcacagatcagcgcctcccctgcccgccatgggctctggagccagcctagccgatgatggagccccagtggccaccgagctatggacagggccgctgggggtgcacccccaccctctccgaccccgaggagctgccggcagagccctgtccactcttgcctcagtttccctgctggacacaaagggctgaagtccaggtcccttcgatggcccaaattacctgactgtcgatcctgactggggcggtggcgacatggcccccgcagctgcccggcggtggcacccaggggcgtcacccacgagggacgcttgactcaaggtcctctccactggccgccgggagccgggccgggagccgctgcggtgccgacctggtgggtggcacacggggggcgggtgcggaccgcctcttctccgctctgccggctgcacatggccagaggacaattgggggtcacagggttaaacgctgactaatctggccattgaaggcccaagcgccgggatatgcagccttgccccttggtcagggctgggctgggggtccgtgggcacaggtgggtgggcagggagtaggtggaggccgcccctcccactgccccgcaggccctggttctggccaggctcaggaagtgagctccctggggacccaggccccatgtccagaagccacgctggacatagtgcccagattccatgcccagcagcctcctctgccaccctcagagacggagaacgtgagagcaagtaagaacccgccttccgggaggagccccgtctggattggatggcatcgcccaaaactcacgtccacccagaacctcaagatgggactgcatttggaaatagggtctctgaagatgttagtttcagtgaggtcctgcagcgtacggtggccccaaatcccatgccggtcggttgtcctctaagggggaggtcacacctgtgatccccgcgctttggaaggccaagacgggagtttcgcttgagcccaggagcttgagaccagcctcagcaacagagtgagacccctgtctctacacaaattagctgggtgtggtggtgcgtgcctgtggtcccagctactctggaggctaaggcaggaggattgcttgagcccaggaagtcgaggctgtagtgagctatagtggcacgactgcactccagactgggcgacagggcaggaccctg[212 bp omitted]gaggcaggagaattgtttgaacccagga[132 bp omitted]tggagacagaggcagaggctggagcgatgtggccacaagccaaggacacctggagcccccagaagctgggagaggagggaaggaccctcccctggagccccagtgacacgctgatgtcagacttgtggagagaagaaacctctgctgacgtggcaccgtgccctgggcaaggttagggcagaaacaccaggctgtgcctccctgggcacacatgtgtctgagcccgaccctttcatgggcacttacggagcacctgctgtatgccagcccgaccctctcatgggcacttacggggcacctgctgtatgccagcccgaccctctcatgggcacttacggggcacctgctgtatgccagcccgaccctctcatgggcacttatggggcacctgttgtatgccagcctgaccctctcatgggcacttacggggcatctgtatgccagcccgaccctctcatgggcacctacagggtacctgctgtatgccagcctgaccctctcatgggcacttacggggcacctgctgtatgccagcctgcctgcgtactggggacacagccgtgcatgaagcagaagctcctgccgccggcactggagtcctgacgtcggcagcgcggtggagggcgggcctgtctcgccgttatctcccaggcgtgtctgctccccgtgtgtctggctgcaggggcgcgtccagggggtgtgtgtgtgtgtgtgtgtgtgtctgcgtgggagtgtctggctgtgtggctgcacggaggcctgtctgggtaggagtgtcggtgggggcggtcccacacggccatggtttgtgtctgccacggcctcagccccgttgcttcggtcgatgcccccaaaccttgacccatctcaggggcaccacgctcactgctacaaatgtgggtcttccgggcaagtgagcgtcccccacccaggacccccgaccccggccctgggagggcccgactgccagcctggctgaacctccttcattgtctggttttcgggggtggattttgagacagggtctcgtgctgtcacccaggctggagtgccgcggtgcagtcatagctcactgcagcctcgacctcccgggctccggtgatcttcccgtgtcagcctcctgagtagctgggaccacagacactcgccaccacacccggctaacttcattttattttttggagacagggtcttgctgcgttgcccaggctgaactcctgagctcttaggggagccgggatgtccctgggtcctgcggtcgctctctgtctccatctcttctttctcctctcccctctccctgtctctgccacccgccccgtcccttccaccacgtcgccctgtaattcttccctgacggccatttttccgggagtggctgggcgtctctgccctagctggcgccctgcccagccactgcccccacccctcagttggccacatgcccatctcgtgggggcccttggacctggttcttggggaagaactagacagatcacctctgtggttattcattgctttaatgccacctggggggagagagcctgggcacaccaacatgcagagatcccagctctgcccgacctgggcctggtgcctgtgacctcctcctctcggcctcagtttccccgcccgtaagacggggatggtatcagaaggagtgcagctcttgtgactttgttttcatccttggcctttacggttcaccaggtttctcctgtaactcctgtagagaggggacggcgtgtggcatggcccctgctgcctgacccagcccacctccgtctgctccctagcggggaggtgtccagggcggccccagcccacctccgtctgctccctgcagcgggtgggatggtggggtgtccctggagcgggcagagccttgagtgactcctccgaggctgctgcccatggtaggggcagttcctgtcctgccctcagcctggggtctggcagaagctccggccaggtgtaccccaagggaccccggaccctgagcccaccagggagggcccttcctcttgactctagggtgggaggtggaagcagccccttccttcctgcagccgtctttgggcccggactccaggcaggcccgtgtcccattgtggggacggcgtcgacatggccggggcaggcgtgttctggccccttgcactgcccggctcctgctgctggtgctgggctgcgtttctgttcagagaacctgggctgggagtgatgggaccgcagtctcccaccaggtgcctctttccaaatggacactcctgctgggcatgacacttctgaggctttctgggaccgtccaggtcccgtctgcagggaaccccaggacggagttaattgctgagtgcccagctctgggcaaagtgcttggaccctgcggttactccgagcccatttctcagcagggaaaaatgaggctcgcggaggcaggggcccggcgtccaggtgggagcatgagggcgtattgtgggtgggctggccggtctggggggcggggaccctgtacagaacgccccggccgcgtggagtggcaggttcgtcactgcctgggggaggagaacactgggtatttcatttttatttttttgttttttttacttttactttttcctttttatttatttatttatgtatttatttatgagacagagtcttgctttgtcacccaggctggagtgcagtggtgcgatcttggctcactgcaagctccgcctcccgggttcaagcgattctcctgccttagcctcccgagtagctgggattacaagcgtgcaccaccacgcccggctaattttttgaatctttttttttttttttttttttgagacggagtctcactgtctcccaggctagagtgcggtgtcgcggtcttggctcactgcaagctccgcctcccgggttcacgccattttcctgcctcagcctcccgagtagctgggactacaggcgcccgccaccatgcccggctaatttttgtatttttagtagagatggggtttc[144 bp omitted]ttctgtttgtttgtttgtgtgtgtgtgtgtgtgacagggtctccctctgttgcccaggctggagtgcagtgatgtcatctcggctcactgcagcctcgagctcctgggctcacgtgatcctcctgcctcagccccctgagtagctgggattacaggtgcgccactatgcctggctaatttttttttttttttttgtaaaaacagggttttgtcatattgcccaggcgggtctcaaactcctgggctcgagcagtctgcccacctcggcctcccacagtgctgggatcaaaggtgggagccactgtgcccagcccacactgagattctgcattgaaatgtttgctgggtgccccccattgctgggcaccgtggggtggggtgtgtctgtgtgtggcctggggcaccccctgccgtcagcccagatctgtgtctgtgtctgcatctgtgaaacgggtttcctggcagatagaggggctgcttaaggccagtgccctcggcggagactctattagggactgcgggccccagatttccacgtcatatctcgccgccatggggctgcctcctgcctcctctgcaccaactttctggaagtgcctgtcagctgatcccaccccggccacatctcagcaccaggcctgtcgctgccgtcctggactcgtgggcctcagtttccccaactgtgaaacgggctggcggccggtcagcgtctcctccctgagcaagggactcccccatccatgtctcagcccccacccagatgccccgggaccgtttcacagatgagaagaccgaggtgccagggtggcgatcgcacgaagggcccgtcacgggagaatgaggagggtctggcgtcagcaagctcccccggaatctcgtgatctggaaatccacagagaagcaccttcaccacgccagcttcccgggccgcgcttcattgtcatttctggagagtgttattaatatccgccccgtgggtgcggcgctgtgtatttccagagaggggactcggggcccatcagggccgggggagtggagccggcagatgttcggccctgcccagaatcacttccccaatttccccacgcccggcggggctctcagcatctgcatccgccgaggcctggctgtgctgacgggaattgaaaggacctcgtggcttaggcaggcgggggagccccccggctggtcaggtgcacgaggagcaacccatggccaggcagagcccagagagggcggggaagggcctgaggtcacacagcagacgctagctaagtaagcgcctgctgggtgtgggtgaccctgccctcccccgacccatcagtccaggtcggtcggggccgcctgtcccctggtgtttcccttcacagcccacccgccccagctgacctcttcctcctgctccctgaaccgggaagtccgggccctttttggacactgcatctccccagcatacaagatagtccaggacacacaggaggtgctcaataatggctgcagagtgccctgtcctggcagaaacgctgtggactgacagccccgtgtggctggccctgtggtccacgctcagctctgctgcctctgtcagtcctgggagtttccgggacgggaaaaacagcgagattcaaaatcccccggcctcccggggccgcggtcctgcggggccacagcgccagcttccgcttcttgatggcttcggccccacccccaccatgggtaaactgaggcccggagaatgggcagactggggcgcgagactccaggtcctccaggtcctcctgccccccgtgccctcctcccgcctgcagccccaggctctgctccgtcttcattccttcttcattcctgcctcatctgtccagctgttcatt[131 bp omitted]actgcaacctccgcctcccggattcaagtgattctcctgcctcagcctcccgagtagctgggactacaggcgtgcgccaccacgcccggctaatttttgtattttagtagagacagggttttgccatgttggccgggctggtctcaaactcctgacctcaggtgatccgcccgcctcggcctcccaaagtactgggattatgggattacaggcatgagccaccgcgcgtggccatcctggagtctacagcagtgatgtggctgcgggggtgcactctggccgcctccttcccgcctctccggactgtggacaagtgaagggctttgcaggttgctggtactctgcaaacctggttaccagagaggtgtggacccctccctgcctcagttccccaaatgcagagcagggccccaggggtgtggggaggcagtgctgggtcccgccctgcccacccctcccagcggcggcgtgggtgcctgtgtggagggggaggtgccaaggcccccagggaccctgcccacctggggagcagcagccgcaggtgctgagtcatctcagcctctgccccgggcctccgccgtgccagatagcaggatcatcaggcctccgggagggggtggggggctgggggtgctgtcagtggatgggagctgccaggagtggggcttcagagaggggccggaaaggggacaccagcattggaggaaggaaagcttcttacggcctctttcttttccttcttcctccaactcctggcctcaagccatcctcctgcctcggcctcccaaagtgctgggattataggcaggagccgccgcccctggcctttcccctccctccagtggatgcctgctggattcccgccac[136 bp omitted]cacctcagcctcctgagtagctggaattacaggggttcaccaccacgcccggctaatttttgtatttttagtagagacggggtttctccatgttggccaggctgggactcctgacctcaggtgatctgcccacctcggcctcccaaagtgctgggatgacaggtgtgagtcaccgcatctgggctagattttgccttgatgggtgggaggtaggcaggaaagatgcaaagaggccgtccccagagtgaacggatggatgaggccgtccccagagtgaacggatggatgaggccgtccccagagtgaacggatggatgaggccgtccccagagtgaacggatggatgaggccgtccccagagtgaacggatggatgaggccgtccccagagtgaacggatggatgaggccgtccccagagggaacggatggatgaggccgtccccagagggaacggatggatgaggccgtccccagagggaacggatggatgaggccgtccccagagggaacggatggatgaggccgtccccagagggaacggatggatgaggccgtccccagagggaacggatggatgaggccgtccccagagggaatggatggatgaggccgtccccagagtgaatggatgagcacccagcctgagcccgggaaggtgctgagggttagcacaggccgcctgctgctgcaggagtgagaggggcccactcagggaaagaggggttcagggggagcagccaggtgtgtacagatggctgtagccatgtggaggcgcgcgtggggaccggcaggcaggcagggagttgggctttcttctgggagcagtagggagccacggttgaccgtggagcaggggagagacctggtttgatcttggtcttgacttccaagccccttggtccctccgaccttggaggctgctggaaggagagggcatctcatttaccatcctggctgcttcatggggatttgggagataaaaagcagctctttcagtttaactttggttgtaggagtcacagtgaattagttctttattttgttttttttttgaggtggagtttcactcttgtttcccaggctggagtgcaatggcacgatctcagctcaccacaacctctgcctcccgggttcaaactattctcctgcctcagcctcttgagtagctggggttacgggcatgcaccaccacgcctggcctattttgtatttttgatagagatggggtttctccatgttggtcaggctggtctcaaactcctgacctcaggtgatccgcccgcctcagcctccctaagtgctgggattacaggcgtgagccactatgcccggccaggattctttcttaaagaagagacggggtctcgctgtgttgctgaggctgatctcaaactcctgggctcaagtgatccttctgccttggcctcccaacgtgctgggattacaggcgtgagcca[136 bp omitted]accccatctctactaaaaatacaaaaattagccaggagtggtggcaggtgcctgtggtcccacctaatcgggaggctgaggtgggaggatcacttgagcccaggaggctgcagtgagctatgactgcatcactgcactccagcctgggcgacagagtaagaccctgtctcaaaaaaaggaaaaaaaacaacgtagactaaagaaccaaacctcagagttccccggctggtctgggtgggcctggctgttggatgaattctctttttccctctgacccttcagccccgctgggtgcgtgggcgcctgggaggctcaggctgctgcccggagggggcggctgctgactcagatctattgctgctgcttctgagcatccgcagacctatatctggccttagaggaaaacatacttcttcagtttcccagaagccatattggacagtgcaaaaacgtgccttttagaacatttctcaggctgggcacagtggctcatacccagaatcccagcacttcgagaggcagaggcgggaggatggcctgaggtcaggagttcaagaccagcttggccaacatggtgaaaccccgtctctgcaaaaaatttaaaaaaaaaattagccaggtgtggtggcacgtgccggtaatcccacctacttgggaggctggggcaggagaatcgtttgaacccgggaggcggaggttgcagtgagctgaggtcacaccactgtactccagcctgagcgacagagcgagactcggtctcaaaacaaaaacaaagtgtctcaggctgggcgtggtggttcatgcccagaatcccagcactctgggaggccgaggagggaggatcacttgagcccaggagtttgtacccagcctgggcaacatagcaagaccccatctctacaaaaaaaagttaaaactgggcatggtggtgtgtgcctggggtcccaactactccagaggctgaggcaggaggatcacttgagcctgagaggctgaggctgcag[132 bp omitted]aaccctcctggaggctcagtcaggccaaccctcctggaggctcagggctcggcagtccccaaacgctagacacttggattctttcttggatttccctgaattctgtggccaaagagagcgtctgaagggctgcagctgaccaggtgcctcccagctcctgcacccctcccacccctgccgtggcctcatccccaggtggggcctcatggactttggagcctcctgggagactggagggggcctggggggcaaaggttctcccagggggccctgcagacaggcggtttctttacagcctgggcctctgggcccaaggacaccgccctgggccccccgcagctgctgggacctggtgggagtgcccaggtggggcctgcctggggactgagtggggaaaccatagcccccctgtgaccttgggcactgcccacctgtgaccttgggcactgctgggggaggggccgcatgtgctggccccggccaccctcttctgtcctggccaaccctttccttggattttctgcaaacctctggggtctttttctgaccttcctcccacctcccagagccggtgggctggggaggggagtcctgagccggggctgaactccctggttctaggggtggtccgggcagccggggaaccccctccccactcccaggtggccctgggacttatcttgcaccctgtccgccagcagactccactgaccccctcggagctgtcgtttctctgggaggtggggtggagaaaatcatcaacgtttcgccacaaacaagaatttcctgtttgcccttccagggctggggggtggcggttatctcactttttcctcccctcccccaccggcgccaccacccgagccccgccaccctctctcctcacaggtgccccctccagaggggcccggtcctcatcaggtgggggcggcacctcccacccccccaggcctcccacacccccccccgtgcagagccgggggagtgtcagggtcgggggccacagcgtcttccctccatccccagagccacggagtgtgtcttgcagatccgtgtaacggggctcgggcgtgcaaccttctgggaagaaaaccaaagaggaatgaaggggtcagaggctgaggggggctgtggagggggctctgtcagaaggcgacgtttgggcgggaaggcaggagccgagcggggacccgggagctgcattccaggcagaaggaacagcgccgcggaggccctggggtgggggcctgtgcgttttacatagaaagacgccaaggctgggtctgggggctcctgcctgtaatcccagcgctgtgggaggctgaggcaggaggatcacttaaggccaggagtttgagaccagcctgagcaatatagcaagaccttgtctctatagaaatacaaaaattagccgagcgtggtggtgcctgcctgtggtctcattggctcaggagaccgaggtgggaggtggaggctgcagtgagctagggtctcaccactgcactccagcctgagtgacagagcgagaccctgtccctaaatagggcagctcaaggccggggcggagggagcaggagagggcagggaggggccaggagggtgctggggggccctgggaggctgtggccgagggagggtcatgctcagatgtctgtgaaaaaccccccaccccacccaactgctgagtggggaagggtctggcaggaggggcggccgggggacctggaggtggcttggctccacgcgctctgtgcctcggtttccccttctccgaagcaggtggtgctgggaaggggagacgatgggcccagccttggtaattaggggtccacaccttccatcccccacagcaggaagtggacagaggggaggggaccccctcagggaaagacccccaggcctgccctgtggccccgcattttcttggcatcgcactgagaaagcaagttcatttaacatgcatttattaggcaactgctgtgtgcccgattttggatgctggcaacaagataagaattccgcatgttccagggcagacagacgagagacaaatgcgtgaatccacacagctggggccatgcgagggctgggggtccaaggggggccgtgagccagaaaccccgtgaggccggtggtcggtaaaggtgggtgggagcagagcatctgcggaggtgatatcggtcctgggaggacggggggctcccctccagggagggaatgaccacaggggacccagacgaagggaaggggctgagaaggcctcgcagacgggaggaacagccggggcgaaggcggccgctcggggctgatggggggcggtgggggtctcagcggaggggcaccttcagaacttcacacccgacccctcccgtgatcagagcaggccccagggaggtcaggcggcgtggaggggagtgcgggccgcttatctcggccctcagcccctggggagggagtttccggagattttgcccaatctccagcctgggtttagggctcctgtgggtgtgtggtgggcggctgatttcagagctttctggttgacgtttcagaggggcagggtttcggccacagaacccaggtgagaaccaaggcctgggtttgccatggggtgtgctgtggcccagcagttcaacccgggatctggcccacaaggggggcctggacaccgccatgggcagcctggacaccgtcccctgctttcccatccctggggcctcggccagctggccagggcggggcgccccccacaggggagcggaaccgggggccagagacccataaagcccaggcggcctttactgctggctttgttgctggctgcccacagcaacggccattagagccgcctcccccgccagcagctggggcccccgcaggtcctccctttactgccacgcatcagtgccccggccccacaggggtctgaccgtgcctcgccaccggcccagttcgcccaccatttggcctgggagttaatggctcccctctccaaccccaaccttggctggctgtacatggggcagctgattgctgcctggcgcctcggtttccccatccgggatgtgagggtagctggggcgccaggtgcttggggtaaagctgctgtgttttctcacacactctatttgagagatggggaaactgaggcaggaggtgcggtgaggtttcttgtaggggctgtgccagggaagggggggtccaggcagggtagaccccgtaataccgggtcagaatctcagaggagaggaccttccgctcgccctggaagggcccaaggtgtgctggcctctacgtgcggttcttagccggggggctgcgtaacgaaggacctcaaaccgcgggcgtaaaacaaacgaaacctgttctccctccgtcctggagcccagagtccaaaatcgaggcgtccgcagggctgcgctccctccaggggctgcaggaggagccttccgcctctcccagctcctgggggctccaggagtcccttgacatgtggccggcctctgtctctgtgcgaccgtctccagtgcccaccggccttcactgtgactttttctcaatttgatcacgtctgcaaaggccctttttccaaataacgtctcgttctgaggttctgggccgatgtgaatttgggtgggggatggcgttcaccccaggacagccccagcggtgaagtcctccccattccagtacctgctgcctcaggcgtttccctggcaagctcgtcctgtccccctctccgccctgtccccctctccgccctgcccggctcacttttgcagctgagaaaatcaaggttcaagtaacgagcatttattaggcaactgctgtgtgctcggctgattccagactctgggaacaaaacagactaaaccccagatacactcctagatccgtgactcggtgatggacggggtctcggaggaagaacgtggaggggagggggcggcagccgggccggggtcagaggacgaggccgggcgtgtggccatgtgtgcgtgcctgtgctcatgggacccaccggcccggccagccgggtctacctgagggccccacacccctcaggcagctgaaggggaaagggcctccccggccaccataaatcagcgcaggaatgcaggctggccagtctggcgctggccgggttggggcggagacaaagaccaggcagctggacctcgggcagcctcgaccacccagggcagaggtcaggactcctggctgcccccccagccccttcccggaaggcctcactgggcctccaatacacagacggggaaactgaggcccagagaggggcaggacggctgcagggtgatggggcctttggccggcctccccagcacctgggatgtccccgcagcagcaggggctgggcgtgggtctccttctgggccctaatgaccgatcatcccagctgaggcctaattggtggtttcaaggctccccactgcccagccagccacattcccccgagcttaattggcagcctggtatttgtcgcagctcctcctcggcaaattggcccccgcctgaactccgctttctaattatccctgccggctttcccccaccctgcccgcccgaacctgtgggtgggggggggcgctgggggacctcctggctccttgtaccccagacggagcctctttcccctctggaagacgttccggggcctggtgatcttcttcctccccagccaccaccctggcaggcagaggcggtcggtggctcatttcatagctggaggctgagactccaggctccaggtgcggggaagccagcaggagacaggaggaccgggatgggaagcagggcggggctctgggccaagtccccagcagcccccaggctctggtcccgcactcgccgctgtgtctcagtttcctcacctgcaaagcagagccagttctcggaacaaatgcgctcccgtccgaccctcaggacagccccgggaggcatgctggtgaatttttgcagcgatttgctgtgtgaactcaggcaggcactgtcctagggtaaattgtgtcccccaaagaaaaggtggagggcggtggctcccgcctgtgaccccagcactttgagaaggcaacacgtgaggatcgagggagcccaggaggtcgagaccagccagggcaacatagaaagacccatctctacaaaagaaaatgtaaaaacttagccgggtgtgatggcgagtgcctgtggtcccagccacttgggcagctgaggcaggagaatcccttgagcccaggaggttgaggctgcagtgagctatgattgcgccactgcactccaggctgggcaacagagtgagaccctgtctccaaaaacaaacaaaaaaaagactttgggaggctgtggcaggcggatcacttgaggtcaggagttcaagaccagcctcgccaaatagtgaaaccctgtctctacccaaaaaatacaaaaattagctgggcatagtggcaggtgcctgtaatcccagctactcaggaggctgaggggggaga[132 bp omitted]gggcgcagtggctcatgcccataatcccagcactttaggagactgaggcagtcggatcacgaggtcaggagaccatcctggccaaatggtgaaactccgtctctactaaaaatacaaaaaaattagccgggcgtggtggcgggcgcctgtagtcccagctactccaagaggc[144 bp omitted]caggttcaagcactggattcccagtacctgtgacaggacctcatttggaaacgggggaacttactgacatacaatcacgtgttgacactttggtcaacctc[184 bp omitted]gtggcgggcgcctgtagtcccagctactcgggaggctgaggcaggagaatggagtgaacccgggaggcggaggttgcggtgagccgagattgcacccctgcactccagcctggggacagcgagactccgtctcaaaaaaaaaaaaattccatatttcttgtgcaccttttctgtgttcagctgtgttagacgcacagacactcatgctcacgttgccactgcctacgggacccaggacagccacagatttgtagcccaggagcgctggctgggctgtgcctgtgcctgggtgtgtgggaggctccacccgtgaggtgtgtgtgactcactgtttgatgttcacactgacgaaatcaccaacagacatttatcaggacgcatcctgcacgaagacagaggcagaggctggagcgacgcggccacaagcccaggaacctggagcccccagaagccgtgagaggcaggaaggttcctcccttggagacttcggagggaacgcaaccctgcagacatcttttgttttgttttgtttttagagacagggttgcgttctgtcgcccaggctggagtgcagtggtgcggtctcggctcacttcagcctccactgcccaggctcaagcaatcctcccacctcagcctcccgagtagccgggactgtaggcatgagccaccccacctgggtaactttttgttatcataatgtagagatggggtctcactatgttgcccaggctggtcttgaattcccgggctcaagcgattcacccgcctcccaaggtgctgggattacaggtgtgagccgccaccctgaagagaagttggttttggacttctgggctccgggaccgcgggagaatagatttctgttgctttaagctgcaacgtgtggctgtaagggagttaaggatcgatttgagatgaggtggccctaaaaccagcaggctggtgtcctgagaagaggagagagagacggggagacggtcttgtggagacggaggcagagactggagcgctgcggccacaagccaggacgcaccttgatctggggttcccgggcccctggaccgggagaggacactgtcttgtcccaggccacctggtttctggtgcctccttgcagaccctctgggaagctcgttcaccggcatttctgtcttgcagccttgtggttcttcacctgcccagcggggtcttcggctctggcagcggcttgagggtcctaggggtggtgacccctgctcctgtcctcctgacctggcctccagtgcaggagggacatggttcccacacctgagctctggcaccaactaacccatcccctctccaccctcacagctctacgaactcgacggggaccccaagaggaaggaattcctggatgacttgttcagcttcatgcagaagcgaggtgagccctctgcccccaccccgctggagggaggtcacagaaacagggctgtaggaggggccctactggctccaggtatgtcggggcggtggtgagcaccccgtggctggaggcatccaaggctcctaaatcgggagggacttcaggggtgtcttggggggaaacacatcctgccatggaggtttgacgcgggaggcacgcctgtgagtctaaggggtaggtcccttggtggggggcagggcagtctcagggccccaacccagaacagacagtccaggtcatctccttagcatccagggtgcagtgaagtgggggtccccactactgggtaatgggggagtggaaccagcctctgtgtttagggagtggggtcagattcgggctggccaggtgggtgcaggtgcggcaggacagaagccccccgcccggccgcgagatggcttagagtctaatgatctcatggcggccaatgcgacatttgagtcctggcccctcccctcttcccaccagggcctcagtttccccatctgtaaaaacgggccacaaacagtccctgcccaaaactcagtggccagcaggtaccccagatgtgctgagtgcagggccgctgtttactgtgcacacttattgggcaccaacggtataccaggctctgtgcccccaaagtctcctggcctagagagggcaggtctgggctggtgtccaggtggggaaactgaggtccagacacaagacagactcagacgaccaagggtagccggggtgtcccagcggccattcccaggccccaccccagcttagagtgaccacggggcagagagagtgcggcaagggcttccgtctcgcctccaagtcctcgtcggccggagagggtcctaggagcgtctgctgccaggtaggagccgccccaacccccctggacactcctctagggcagggagctagctccgatccccactgttcagacgggggaggaggccttggggcccacagaggtcggaaggggtggggcagagggctctgtccctgcacttggggccgtcacaggggcccgctgtgtcccagcctccgcccacccctcccctggcttctataaacacaggccccagacccgccactgccagccgcccggaagggaaggaggaggagggttgtgggccccctggcccacactgcccagcggcctccgagttaacccctcccgtgctgggaacagaggatccagacccgggacctgggcgggggcccctcctgtgttatcctccaaggccaggcttgaccagggcccactgccccctgtgaggctggacagatcctccccatgaccctttatcatcctgttcgcacctgctcagccctgaccactctgctgtggggctccgagctcctgggtccaaagccaacccgttttgctgttacccgtgcctggtacagtgcctggtg[132 bp omitted]gaaaccccgtctctactaaaagtacaaaaattgaccaggcgtggtggcaggcgcctgtaatcccagctacttgggaggctgaggcaggagaattgcttgaatccaggaggcagaggttgcagtgagccgagattgcagcactgcactctagcctgggtgacagagggagcccccgtctcaaacaaacaaaaagcaggcatggtaggctgctcatgagtgtgggtgagatgggggcccgtggcacgtggggccgtgagggttggtgtccagctttacctccctctccaagctgggaattcctacaggacaggagacagcgagctcctatgcgtccctcaaaacccagcctcaaagctccctcttccttggcttcctccaggagcttcctgctctgtaatgggggcccttggagctgagaatccgtcaggtgaacctgcccatcaccctagacttcacaatcttcctctccttcactccagacagagagaaataattttttttttcccctgtgtcacaaagtaaaaaactctaactaaatttctcagaattctctgggggctagaagtgagggaggggtcctgaccacaccctctcccctcagcagcagcagctggaccacctgacctgctgttccctgacaacctccccacccttccttatctgggccccacgacgggccctggtgatgctcccagctccttctgtaaacatcctcctcccgcccactgcagagccagggcgtggccctgggaaccaaccctctgctgctgatccttttttttttttttttttgagacagagttttgcttttgttgctgaggctggagtgcaatggcggggtctcggctctctgcaacctccacctcccaggttcaagtgattcccctgcctcagcctcctgagtagctgggattacaggcgcccgccaccacgcccggctaatttttgtatttttagtagagacagggtttctccctattggccaggctggtctcgaactcctgaccttgggtgatccgcccgcctcagcctcccaaagtgctggaatgacaggcttgagccaccgcgcccggcctgatgccgttacttttactttgcaaactctgaggcctaaactggtgtcccgagtggggccgggcggaggctctgggcaggtttccgggccgatcctgcagctgaaacccggcgcggctcctctcgcccaggctgtaaagtgggtttcaggtgggatcgggtctgaggcccgtcttcctccaacctgggatctcctccattcactgggggttttgcaacctgggaagggcctggaagtggcggagggtggtgggaggtgtttctggaaggtcagacaccgggggttccgggggtagcaggcctcgaccaggcagagggccggctgctcactcagggctgcacccgctctccagccagtcacatcccagaacctcgatgtccacgtccccatccctaacagggcgatgggcgtcccctcccaccccatggtgagtgggcagcagctatggcctgggccacctgccctcactggtcttcactgagcgcctactgtatgccactgagtgctgggaccccacgtaggcagaacatggggtgggggccacagactgtacacaattgatctcctaagtgcagaatttcacggacagaacgataggtttaagtgggtcttgcctactgtcaggccagggaggggctgggcagaggtggagctgacatctgaagccagaggctcctggtgcaggggcagcctgggagagccctggagggggcaggtagggctggaagggcggggaggggccacgtctgcagccggctccaggagttgaggggcaggaacctgagtcagcccagccgcctcttcttcctgggccagcccacctaccgcccttcccctgcctaggctaatcctccccctttccctccctggcatagcgtagcccacaaccctctcctcctgggctagcccaaccccccatgtcggggctagcccatccccttcccctccctaggccagtccacagccctccattctccagacttgaaattgggtaagccaggctttaccccttgcctgcctgaggctgcagagcccctgtcagtgtggagggaacaggcctctgggaacataggcagagttgttttggcagctgccgtggtgtgtggcgtggagaaggaataacaaagatccgggcgtctcccgcacgtccctcctctcagtaaccctcctcccgagggctgcgctgtccctaagcccaggttactggtggataaaccgaggcagagctgccccctctgcaccctctcgagcagaggttcccagcctggatgatcctgcacccacagagggccctgggcaatgtctggagacatctgtggttgtcacagcctgggcgggggagtgctcctggcatggagagggcggaggccaggacactcggctccctgcagtgcccaggtggcccccaacctccctctcgccccttcccccagggacacctgtgaaccgcatccccatcatggccaaacaggtccttgacctgttcatgctgtacgtgctggtgacggagaagggcggcctcgtggaggtcatcaacaagaagctgtggcgtgagatcaccaagggcctcaacctgcccacgtccatcaccagtgcagccttcaccctgcggacccagtgagtggcggacggttgtgccgaggtcgggccagggcactctgagcagccagtgcaaggggcctgcagaagagggagggggtggtgggcagctgcagaggagggggcagtgggcagccgcaaagggcacagggccacaccgtgcgtccagggcccgagagcgtcaagtaggggtgcgaggaccacacagtctctggggttgtgcaatcaggggccattgcgaggaacagcattgagatggagggaatgggcaaaggcccagcagctctgggggctgctgagcaagtccaagggaagaaccagggatggtggtgccacagtggggtttactttgtactgaaggccaaagagagccgtaggggtgacccgggtgccatcctcttccctcgtcccacccacagatacatgaagtacctgtacccctacgagtgtgagaagcggggcctcagtaaccccaatgagctccaggcagccatagacagcaaccgacgggagggccggcgccagagctttggtggctccctctttgcctactcgccaggcggggcacacggcatgctctcctcacccaagctacccgtgtcctccctgggcctggccgcaagcaccaatggcagctccatcacccccgcccctaagatcaagaaaggtaagggcctgtatggggcctggggcgtgttcccaactgagcttcagcctggctgtctgaccttgggggatacctcttcccctctctgggtaaccaggatgaaaaaccctatagttggcatggaaaagggcttccaatctaccagtcctctgcctatggcagacattaccaatccatcaccattttctaattccacacaggtggcaggcagacattgctaatcaatctgtgtttccagtcctgtggccaaggcagacattactaattgatcactgtttttccagtctacactgaggcaggcatcatcagttgatcagttttccctcccactgagcctctgaatcctccataacacagaggtaccaacagcacacacagcagtgtcacctcagtttgcctgtctgagttaccatttctcatctgggcaacatagtgagaccccatctcaaaaaaaaaaaaaaaaattagctgggcgtggcaacgtgcacctgtggtcccagctacccaggaagctgaggtggtcagatgggttgagcccaggaggtcgaggctgtggtgaactgagattacaccactgcactacagcctgagcaacagtagtgagacccagtctaaaaaaaatttttttaggccaggcacagtggctcacgcctgtagtcccagcactttgggaggctgaggcaggcggatcgcttgaggtcagaagtttgagaccagcctaatcaatatggtgaaaccctgtctctactaaaaatacaaaaattagccgggtgtggtggcacacacctgtagtcccagctacttgggaggctgaggcaggagaatcgcttgaacccaggtggcagaggttgcggtgagccaagatcacgtcactgcattccagcctcagcgacagagtgagactccgtgtcaaaaaaaaaaaaaaaaaaaattagcttagtgtggtggtgggcgcctgtaatcccagctactcaggagactgaggcagaagaatcacctgagcctgagaggcagaggttgcagtgagctgggatcgcgccactgccctccagcct[148 bp omitted]accccgtctctactaaaaatacaaaattagccaggcgtggtggcgggtgcctgtttcccagctactagggaggctaaggcaggagaatcacttgaacccgggaggcagaggttgcggtgagctgagatcgcaccattgcactccagcctgggcaacaagagtgaaactccgtctcaaaaaaaaaaaaaaaaagaaaagaaaagaaaaaagaaggtgcatgttcctgccttgagtggaaggcagggcccagcccctcctggccaccaattccccttttttcctacctagaggaggactcagccatccccatcacagtccctggccgcctgcctgtgtccctggcgggccaccctgtggtggcagcccaggcagcagctgtgcaagcagcagccgcccaagcagctgtggccgcacaggcagctgccctggaacagctgcgggagaagctggagtctgcagagcctccggagaagaagatggccctggtggccgatgagcagcaacggctgatgcaacgtgcactccagcagaacttcctggccatggcggcccagctgcccatgagcattcggatcaacagccaaggtactgccctcgtgcccagacccgctgtgcttcctgcgtgtgtcacacagtgagggccttggagcctacatatgtaaagagtgccaacaaatcaataagaaaaaaaaagccgggtgcagtggctgacatctgtaatcccagcactttgggagaccgaggtgggtggatcacttgaggtcaggagttcgagatcagcctgggcaacatggtgaaactccatctctactaaaaatacaacaaattagccgggcgtggcagcgcacccctgtagtcccagctacttgggaggctgaggcaggagaatcacatgaactgggagatggaggttgcagtgacccgagataacgccactgcactccagcctgggcaacaatagcaaaactccatctcaaaaaataaaaaataataaagtaaactggctgggcaccgtggctcatgcctataatcccagcactttgggaggctgaaatgggaggattgcttgagcccaggaatttgagatcagcctgagcaacacagtgagatgccatctctacaaaagttagctgggcgtggtgacacgctcctgtagccccagctactcgggaggctgagatgggaggatcacttgagcccaggaagtcgaggctgcagtgagccatgattgcaccactgcattccagcctgggtgacagagcaagacctggtctcaaaaacaaggtaaaaaaaaacaaagtggagtatggacaaatacacttattcaacaaataaatattgagcacctactgtgtgcactggtgacagcatgaatgtgacagacaccgtctacaccttgtaaagctaaaatctagttggcgagacagacagaaaacagaacatgtc[216 bp omitted]gaggcaggagaattgcttgaaccctggaggtggaggttgcagtgagccgagatcgcaccactgcactccagcctgggtgacagagtgagactccgtctcaaaaaaaaa[146 bp omitted]aatacaaaaaattagccaggcgtggtggcgggcgcctgtagtcccagctactgggaggctgaggcaggagaatggcgtgaacccaggaggcagagcttgcagtgagctgagatcgcgccactgcactccagcctgggcaacagagcaagactctgtctcaaaaaaaaaaagaaaaaaagaaactaatttgttcttcttcccacagcctccgaaagccgccaggactctgctgtgaacctgacgggcaccaacggcagcaacagcatcagcatgtcggtggagatcaacggcatcatgtacacaggtaggacccctgaggccacgccctgcctggacctcgcctctcccgccgccgtgaactcaggaccctgagttgcgcctggtcccacctgcttgaacctaggtgtgcgggcgagcagggcacggccaggggctttgcaggacaaacagtcaagactgatggagaggataccatcgttcacccggtaccacgctcagcccagagggggtcgtccacagatacatattcagtgtgacgttggatggttcacattcctagttttttgttttaatgagacggagtcttgcacagacatgcaccagcacacctggttaatttttaaattttttgttgctctttaaattttaaattgctttgtt[139 bp omitted]caggggttagagactttcaggctgcagcaagctgtgatgacgccactgcactccagcctgggccacagaccgagaccctgtctcttgaaaaaaaatttaatgaatgtattttttattttttttaatttgtaatttgtaatttttgtgggtacatagtaggtatatatatttatgggttttatgagatgttttatactggcatccaatgcctaataatcacatcagggtaaatgaggtatccaaaaaattgaatctaggctgggtgcagtggctcatggctatagttccagcacttcgggaggttaacacgggaggatcacttgagcccaggagttcaagaccagtctgggcaacatagtgagaccccatctctcctaaaaatataaaaatcagcagggcgtggtggcaggcgcccatagtcccagctactcgggaggctgagtagggaggatcacttgagcccaggaggtggaggttgcagtgagtcaagatcacaccattgcactccagcctgggtgaaagagtgagatcccgtccttctctctctctatatatctatatatagatatatcgatagatatagctgtagctatacatagatatatatagattagatatagatttatatgtatctataaatacatatatacttttatatctatatctacatagatatatatatatatagttgttttttttttcttttgagagggagtcttccctctgtcacccaggctggagtgcagtggcacgatcttgactcactgcaacctgtgcctcctgggttcgagcgattctcctgcctcagcctccccaagtagctgggactacaggcgtgtgtcaccacacccagctaatttttttttgtatttttagtagagatgaggtttc[133 bp omitted]attaaaaagttgccgggcacagtaggtcacacctgtaatcccagcagtttgggaggctgatgtgggtgggtcacaaggtcaggagttcaagaccagcctgatcaacatggtgaaaccccatcttccctaaaaatacaagaattagcgaggtgtgctggtgtgtgcctataatcccagctgcttaggaggctgaggcaggagaattgcttgaacccgggaggcgaaggttgcagtgagccgagatcgcgccaccgcactccagcctgtgcaatggagcaagacttcgtctcagaggaagaaaaaaaaaagaattaaaaaatttaattaaaaaagtggagtcagtgccaggggcagtggcccacgcctgtaatcccaacactttgggaggctaaggagagaggtttgcttgaggccagcctgggcaacac[138 bp omitted]ctccgcctcctgagtagctgggattacaggtgcatgccaccaggcccggctaatttttgtatttttagatgatacggggtttcaccatgttggtcaggctggtctcgaactcctgacttcgtgatctgctggtcttggcctcccaaagtgctgggattacaggcattagccaccacacccggcggtaaatgaatagtttttcttaaagtggagtcaggccgatggttcatagtggccaccaggtggcgctgtcgacacagagcagccttgttgcaggcccccgcccggctgtggtcagaggctgagctgaaggtcagtggtgtcctcacaggtccacaaatggatttttgaggggtccgtgccctccggaaatcagatgtaaaacgtgtacattcatattgaatcttacaggggagaaggccaactgtgtgctaggggtctcgcaaccccacatcaacgaaccatgggcatcagggttctccctgcaagagctgtgtgcacgctgatgtgcatgtgtggattaaacacacgtgtgtgctcacgtgcatccatatatatgcacatgtgtgtgatgaaggagtgagcagacacagtggggaagtttaagctgggctcacgtctgtaatcccagcactttgggagtcagaggcaggaggattgttttaggccaggaacttgagaccagcctgggcaacatattgagagcccatctctacaaaaaataaaaaattgctaaaatattgccagccacagtggctcatgcctgtcatcccagcactctgggaggccaaggtgggtggatcacctgaggtcaggagttggagaccagcctggccaacatggtgaaactccgtctgtactaaaaataaaaaattggctggtgtagtggcaggcgcctgtagttagtcccagctactcaggagggtgagacaggaaaactgcttgaacccaggaggtggaggttgcagtgagccaatatcgcaccactgcactccagcctgcgcgacagagcgagacaccatctcaaaaaaaaacaaaaaaataaaaaattagccagacatggtggcacgcccctgtggtctcagctactcgggaggctgagctgggaggatcacttgagcccatgaggttgaggctgcagtgagctctgatgccaccactgcactctagcctgggggacagagtgagagagaagtttattccccggagcaccccattgggtctcccttgtggcccgcctcgcatcttcttaaactctgcatggcatatgtcttctgttcttgccttaggagttctgtttgctcagccgccggcccccacgccaacctctgctcccaacaaaggaggcggcggcggcggcggcagcagcagcaacgcaggcggccggggaggaaacaccggaaccagcggcggccaggctgggccagcggggctgtccacaccctccacatctacctcaaataactcgttgccttaaccgcatcactccccacccgccacccaccctggagcccgccggcctgggcagggggtccaggtgggccacacaggggccaggatggcggaagatacgggtggggagggaagatatccagaaaggagccacagctgacgccaaaaagaaaagaaaaaagatatatatatatatatatatatatacacgtatatatataaagagaatttaataaaacaggggaaaaccaaggaacacttgaatttctcaggttttggacattcagagagatgaattgtgagaacagcaaagaaatccatcagaaaaacagaaagaggcagacgtttcccagggcgttcaggcagccctgatggaccgaaggctctggtgtctggtttggccccacagcagtgtgggccgatcctgtttacctcatacatccctgcactgtgtgttttcatttttgtctgctttagttctcttttattttctattcaccacacactcaccactcccagcttctcgtgtccagtgaaacccctgaaccaagatcactgaatttttgtttttttcttgttgctttgggaaatttttttttctctgtagggtttttaagaggtttcgggggttttgttgtgtaaatattctattttattcttggggggatcaaaccttaggaaaaggatatctatatatctatatagctatatatttgtgttccttcagggaaactggtcttgaaaaagcaagaaaaaaaagcaaaaaaaaaaaaaaaaaaaaaaaaaaaaaactcacctttttatttttcccatgaccaatttgggtccctttgtccatttctgggggtgcgttgggcagctgtgagcccagcacatcggatccctggggctagagccgcggagccaatgaactcaggtgctatgggccgggctggggcagagggtgcatgctggggtcccaccggccaggggcccctgacagtgaattgctgactgtgatattccacgatgcttttgcttgtgccgtgcttgtctgctgggctctcgagtcaggggcctggaaatttttttttttttttttttttgagacggagttttgctcttgtcgcccaggctggagtgagtgcaatggtgcgatcttggctcactgcaacctgcacctcccaggtgcaagcgattctcctgcctcagcctccggagtagctgggattacaggcgcccgccaccacgcccagttaatttttgtatttttagtagagatgggggttttgccatgttggtcaggctgatctcgaactcctgacctcaggtgatctgcccgccttggcctcccaaagtgctgggattacaggcatgagccgccacgctggcccggtctggaaatcttatctaaaaagtagcaagtgctggaaaaagggcctggggggcgggggtggttcttgtcgaagcccccaggctcctgtctcagggatgaatgtggcgtctcattgggattcttctcttgcccgaaagggctgcttttgaggactatcaatactggggagtgggggtgaagccggacctcactcagggtgaggatttcagggccccggcatcctgaacaccccccacaccccaacattctcctcgctctgtcccttcctcttctcccaaccccttttgtgctggggctgcgagctccccgagttctgcggtgactaaatcgaggccgagaagggaggctgccccccaccaccctgtgggtcagtacccctccccctggcttggagaaagtggggtcaccgcagctgagctggggggttattttggctggagctgctggagcagaaaggctgggtctgaaatgcccagcagggtctggggacttcgttggacccgcgtggtgttgggcggggctgtcgtgtcctacacgggagctctgggctttcatttctcttggggtgcagtggggattaactcagctattcccagggtaagcctgggtctctaattgggccctgggagccctgttaggccaccggcatgggggcttggtgaggaaggggactccccagctccccccactcccaaccacctccccattgccttggagacccctggggagggggctggggggcttctgagcccctgagtctaggttcactttcccgtcgggctgtgggaggggactgtcactttcctgtgtctttggggaggggacccccacttccttctcggatctcagggccgtggacacacaccccctttccaggagggggtggtgggcgtctaggttttccttgtcccttcctggggccagcaccgtagcagcacaatcaccccgggaagggggtgtctgtttgcctccagacacaatcgggccccactcgcagaaccacctggactctgtccgtgtctgtcccccggcctccagggctcctctcccgggacccccgtcccacgcctgggccccgcgccgggggaagcgcctgctgcctatctctgtctacctcaggtctgacttttgatgccaaaatctgagcccctggggtgcctctcccccgcctcccgtgcaccagggtctgcagcagccactggggcctggctgcctgctgcatctggcggccctggacccctggggcccccgtgcacctgcccacctcggagcctggggaggggccgtgcagggtcgagggctgggtcgtctccctcgggctgcgtgtgtgtgtcgggaatcctgcgtgtcgtgtctgtgggcgatccggcctcccggcggtgggtggacctggattctaactcagaggacttgagcctgctgttaactccgatgattgtagggacaggcggggtgggtggggggtgggcgcgaggctgggtcccggcccaggagaaggaagtcgctgaaggcagtggccatgctggccgtggaaatgggaggcggttgcagagggtctatggggcccggtcctggatactcggcaggaagccgtgtctgcagaggctcctccctgcctcaggtggccccgttcaaccccagccgtgcccatctcctgccaccgcctgtcggtgggggtttaaattcggtgtggctttctggggtgcagctcagcacccccccttatgcagactgggagggggtcgggcagtcccctcagccacgaggaccctggatgggttctagttcacttgggaccgtggggcctggctgcgtactgagtgggtgccccacagtcaaggccaacgggggctccccctgctctgagatgttgggagaaaggcggcttctggaaccttccgtgggacccgtaagtggctgtccagaaaggcgggagggtgggcacggggcacggggggcagctggggtcgttgttaagggtcacgcatctgtacagttgaatttcctttctcttatcatgttttacccaccttgtcccttttttccccaattgtgcttttgcatttttttccttggcaaatgtaaactcagcctttcattcatgacgtgtgaaatttcagtttctctggagtttgtcagacggcgtgggaaccacgcctgaaactcaggtaataggaggaaaaaaaaaaaaacttaaaaaaatttttaaaaaacataaaactactctctacctctggctgggcccagcctgtctcgccctggccgcggcagggtggcctgtaacaatttcagttttcgcagaacattcaggtattaaaaggaaaaaaaaaaaaaaagacaaaaagaccaaaaaaaaaaaaaagtgtgattttgaaatttaaaagaacactgaaagtttacattttatagtaacattattatgcagattgtatttaaacttcagaaatatttaagacgattgtaaccctgtaaagctgatgagatattaaaacgagacaaaacacttctgacttttaacagaaaagtgtcctgtggtgttttttttcttttggcgtctccccaacctccagctccaccctacacccctgcccagcacagccaggggtgagtggaagggggtgctctatccccctctgccctgcatcgctctaggtctggttccgggcggcagagacagctacaaaagcgggggtctggccaggtgcggtggctcacgcctgttatcccagcactttgggaggtctaggagggcggaatcacctgagttcgggagtttgagaccagcctgaccaacatggtgaaaccccatctctactaaaaatacaaaattatccgggcgtggtggcgcgtgcctgtaatcccagctactccggaggctgaggcaggagaattacttgaacccaggaggcggaggttgcagtgagccgagattgcgccactgcactccagcctcggcgacaagagggaaactccatcaaaaaaaaaaaaaaaaaaaaaagcaggggtcctcagccagggtctgtgcccccagggggaccctggtccatgtctgggggcatttgtggttgtcacgcctgggggggcgctcctggtgtggagtgggtggagtcctgggatgctgctcggcaccctgagtgcccaggacggccccaccgcagagaacaatctggcgcccagcatccacactgcaggagttgggaaattctgccttcattatttaaggtggggtaaaaacagttctccctgcccacagcagacaccaggataagctcctgacagggcagacggtgtaaacccgggggaacccagctcctgggactcgcctcctctctccctccctactcagggcatggatttcagtgtgtgcagcctcctgggaccccagcagggccgaggatcatgggatgcagagtctgtagggggtccatggaatcccctaacccagagggccttaaccagggtgattccgcccccaggggaccctggtccatgtctggggacatctgtggttgtcccatctggggggagctcctgacatggagtgggtgaagtccagggacgctgctcggcaccctgagtgcccaggacgtccccaccccagagaaggatccaaccgcaaggtccacagggccgaggggagctcctggaggccgctctgggcacctctgtgcctcgctgagagcccgacaccaatcccgttttagggatttgggatgacaggtgtggcagggccagtgtgcgcacccccagccacctgcccacgagcctgacccctcgcctcctgcctcaacagggctctgcatgcgggcgcccctggcgttatccgaccggagctcccagggcaagtggcccggtccggcctcagggccttcacacagctgttccaccgccgggaacagccctctccccctttgctctgacagactcctttccatcctctgcagccgacacacagtccccgcctgcccatgacaggagggtgcggcccctcgggtgggaggcacggggctccccgctcctccgccctctgtgcggcccagatggaggcccttgtgccgagcgggacaccctgttcccgagccccccataagtttgccctccttcacctcctaggcgagcccaggaaccagcccactggtgaagccgcctggagctgaggcctctggggttcaggggcgtcctggtggctgggggagggaacttttccagtgctggccacattttcaccttttcccttacaacaccattcgggtcctaggaaacaagaccaagggccagatttggcccctggacagccagtttgcagcccccaaacccagaacatagtaaagggactcagctggggtcagaggttcacacccgtaatcccaacactcggaggctggagcgggaggatggatagagcccaggagtttgagaccagcctgggcaacatagggagaccccatttctaccagaaattaaaaaaaaaaaaaaaagccgggcatggtggctgcggtgaacagtgatcatgccattgtactccagcctgggcaacagcaagaccctgtctctctctctctcttttttttttttgagacgaagtctcgctctttctcccaggctggggtgcagtggtgcattctcggctcactccaacctctgcctcccaggttcaagcaattctcctgcctcagcctcccgagtagctgggagtataggcgcccgccaccacacccggctaatttttgtatttttagtagagatggggttccaccatgttggccaggatggcctcgatatcctgacctcgtgatttgcctgccttggcctcctaaagtgctgggattacaggcatgagccactgtgcctggccccttttttttttttttttgaatcagggtctcactgtgtcaaccaggctggagtgcaatggcacaatcttggctcattacaacctctgcctcctgggttcaagcgattctcccaactcaacctcccaggtagctgggattacaggcacgcggcaccacgcctggctaatttttgtgcttttagtagcaacgggttgggttttcaccatgttggccaggctggtctcgaactcctgacctcaaatgataacacccaccttggccacacagggccagccgggaccctgtctcttaaaaataataataaaaggccgggcacggtggcttacgcctgtaatcctagcactttgggaggccaaggtgggtggattgcctgagctcgggagttcgagaccggtctgggcaacatggcaaaaccctgtctctactaaaataaaaaaaattagctgggcgtggtggtgtgcacctgtagtcccagcttcttgggaggctgaggcaggagaattgctagaatctgggaggcagaggttgcagtgagctgagatcaacccactgcactccagcctgggtgacagagcaagactccatctct[192 bp omitted]aggctgaggcaggggaatggcatgaacccagaggcggagcttgcagtgagtcgagatcacgccactgcactccagcctgggtgatagagcgagactccgtctctaaaaacattaactaattaattaattaaaaattaaaaaataaaaggcctctcgttcttagcccacaaacccaaagaaagtggtattgcaacgttttcccaggaaagggtttcctgggccgcctaacccactgtccaccctcccattgcccacgcccaggggacgtgactggaggagggtcagcgtggctggaggtggacaggcccagactcagctgcccggcctcccgcgcaccatcctggccgaggctggccgggacacgtccctccccagggctgtgttggaggcgagggaccaacaacacccccacacctgtcccagccggttggttcctgaaacccacgttagaccctggccccggaagggaaaatggcattttccattccagccagaaatgagtctgccaaaccctgcgtcccggagatggagtcccactcactgcctggaggagcccgccggccccagggagaggagggaagaaccctgggaaagcccccaccccaaactggatcgtcaggccctgcttgttcacccgcagctgagggcctcagaggcggggagtcagggagggggtgcacctctgagttccccagcctgggagggagggactcagcccccagctctccccagccagggagggactcagccccccacctcctccccaggcccccacctctccccagccagggagggactcagccccccacctcctccccaggcccccacctccctccccagccaaggagggactcagccccccacctcctccccaggcccccacctccctccccagccaaggagggactcagccccccacctcctccccaggcccccacctccctccccagccaaggagggactcagccccccacctcctccccaggcccccacctccctccccagccagggatggactcagcccctcacctcctccccagcccaggaagggcccagccaccccctagcctctcagagcccagccacctccctgggccgcctgctaggtgcttgctaggagggcgggaggctcccggaggtgaagctcaaaccctcctctgatagccgattttcggagccagccaagagtccagactggagaggcggcggctgagacgcttccaaaagcagagggctaccagagccggctgctgctctccccactggcataggtaatgatggggctgccgcgggacggccgcagctgctgggtctgtggggccaggaccggggcagccaagccgactggggtctggctgggttcatcagtgcctgcaaactggcggtgctccataaatgtgcaggggatggagaatgagggccttacaccccgaggggaacgttcctgcctctgtgcctcagtttccccttcctggttacccccccttcacaacctccagctggcaccaacgagatccggccgctgggtggtctggagatgcccccaaagtgtggcttctgtcccctgctccaacacgattagtctgtcctcattccaggaaccaggctgggggcggggtgacctctgacctcacactgcagcctggcctggccacgtccccagggaggggaggaggggaggaaggcctggctcgggctgggccgcagcaggaggcctgtgagaaggtggagactgtagtccatcgacttcctgctgcccctgccctctcctgcctgtggcagcagcccacacctgcccggtctgctgggtgtcctggaacccgggaatttaaaaacttccaggctgggccaggcggtggctcatgcctgtaatcccagcaccctgggaggtcgaggaaggaggatggtttcaacccaggagttcaagaccagcctgggcaacacggcgagagcccctatctatgaaaaattaaaacgctagtcaggtgtggtggtgtgcacctgtggtcccgggaggctaaggtgggaggatcgcttgagccctggaggttgaggctgcagtgagctatgacggtaccactgcactccagcctg[219 bp omitted]gggtgaggcaggagaatcgctggaaaccagaaggcggaggttgcagtgagctgattgtgccattgcactccagcctgggcaacaagagcaagactcaattt[132 bp omitted]catggtgaaaccccgtctctactaaaactacaaaaattagccgggcgtggtggtgaacacctgcaatgccagctattcaggaggctgaggcaggaaaaccacttgaagccaggaggcggaggtcgaagtgagctgagatcacgccactgcactccagcctgggcaacagagtgagatccacctctcctgcttgtctacaaaaaacaaaaataaataaagtaaaaattaaaacaaggccaggcacagtggctcatgtctgtaatcccaacccttcgggaggccaaggtgggagcatcatttgagcccgggagtttaagaccagctgggcaataaagcaagaccctgtcgctgcaaaaaaagaaaaaaaaaaagcacaaaattagttgagtgtggttcctatggttccagctactcgggaagctgaggtgggaggatggcttgagcccaggaattggagactacagtgagccatgattgcacgattctcctgcctcagcctcccgagtagctgggattacaggcatgcaccactgtgcccagctaatttttgtatttttagtagagacgggtttcaccttgttatccaggatgatcttgatctcgtgatccacccacctcggtctcccaaagtgctgggattacaggccggagccaccacgccccgccgatttttttaaataatgttttttaaataatgttggaggccggcctcagtagctgacgcctgtaatcccagcactttgagaggccgagacgggcagatcacctgaggtcaggagttcgagaccagcctggccaacgtggtgaaactccgtctctactaaaaatacaaaacttagctgggcgtggcggctcacacctgtaatcccagctactcgggaggctgagacaggagaatcgcttgaacccgggaggcagaggtagcagtgagccgagatcgcaccattgcactccaacctgggccacagagcaagactgtcgcaaaataaagaaagaaaataaaaatgaggttggaggaaactctggaggcacagcaggtccttggattggactccctccctccctcccaggataaaatgaaatccaggcctcgttcacacggccctgcacggcccggccccgctccgtggtcctgccccagggccttcgcacgggcctgccccgcacacggttctctgggggtcgctggctccccgctcaaacggcccctcctgccgaccaggcgggtccccggggccgccctccctctggcctgggctcggggtcggtggctcgcgcctgccacctggcggccagcggggctgcggcgccgcacgctctggcaccagcctcctgccccggccgtgccctccgccgggagccgcggaccaggagtcgcaccgcctccggggaccgcaccccgcatgcagcctccagcccctgcctcttgctgctcgagggcacacgacccaggtcagctgcaacccccgggcggaaatcccgacttttaaatgaatgctccctttttatccctttttaaggggttggcaactaattgcacattttaaatcatactgtttttaggccggacgttgtggctgaagcctgtaatcccagcggtttaagaggccaaggcctaagcccaggtgttggagaccagcctgagcaacacagtgagaccccccatctctactagatatatatttagtataaataaataatagatatatgtttttctttgagacagagtctcattcgcccaggctggagtgcctgggatctcggctcactgagacctccgcctcccgggttcaagcgattctcctgcctcagcctcccaccacgcccggctttttgtactttttgtaaagacggggtttcg[132 bp omitted]atggtccgtgacgggcagccgtgacatgaagttagaccctgcttggctcggacagaactggcgacttgtttgacctacaccaagctatccgactaataatttagatgttgaggcccctaaagag[134 bp omitted]ggcaggacagtgagaccctggctctacaaaactaaataaataaggaagcagtgaattccaatgtattcatcgccaactagccatgttgctgggtgtgcgctctctcttttaggcgcaatgtgtcatttaggcctgtgacgtcggaactttattatttgaacatttaaaaataaatgaatccaagagcttgagtcacttggccaaaaatgcccaggaggaaaaggccaagtcaggtaccccggctctagagctactaactgatcgccggagaccctgggccttggaagaagtcgcctccccagatctctaagcaggccgcgcgaccctcgagtctcaggtaagcgggaaatcccacttcacaagaaagcccctctctccgaggcacgggcgcatgcgcgggtcggccacccgctggggccgcggggccgccgctctggcccgcgtggggcagtcgtccgcgtctcgctcatgatgacgcacgtccggggcggtggggaaggcaagatggcggcgcccatggaggtggccgtgtgtacggactcggcggccccgatgtggagctgcatcgtgtgggaacttcactcgggcgccaacctgctcacctaccgcggcggccaggcgggaccccgcggcctggcgctgctcaatggcgagtatctgctggcggcgcagctgggcaagaattacatcagcgcctgggagctccagcggaaggtgcggcggtgcggtctcgctgctggggtcatggggcgcccgaggctgaagtcgggggatgggttggtgggggccgcgtgcacccttagtcggaattggcgtggggaggggaggtggtctccgttcgggcgctctgcgcatgcgcgggtctgggggctttggggagatacgtgcgacctgttaggccgctctgcgcacgcgcggggctcaggcctgagctgctatgggggcagtgggggaaaatgggagacgctccggggggtcccttggggcaattgcgcatgcacgagttcttggagcgcgaaatttgattaaaaggggcctatgagctctgtggatgttgtggttctggaggaaaagggagaaggaccaaggtctgggggagtctcccatgaaggggtggcgcaggaaactcatgtttattcctccaataaagcaacagatactcaccgtcgcccacagtttcccctctactcccaagcccaaatgcagccagtccctgaagctactcgcttcccccgtgtgcccgctgagatctcttgggactggctctgtgctccagcattgcctgatggagtctacacacaactcataaatttctcccattttattttagttttgagacagggtctcactctgtcgctgaggctggagtgcagtggtgcgatctcggctcactgcagcctctgcctctagggttcaagcgattctcgggcctcagcctcctgagtagctgcaactacaggcccgcaccaaccaccacacccggcccacatttgtattttttgtagaggcagggtttcaccatgttggccaggctggtctcgaactcctgacctcaagtgatctgcccacctcagcctcccaaagtgctgggattacagccgtgagccaccacgcccggctgagttttcccattttagagaggaggaagctgaggcttggggtcttaggttggacattatggatagaaggattggggcacaagcctactgggctcttgggccccagtgtccttctggatcctctttgttctgttcctgtactcctcccacccagggcccctctgaccctcagaggaagcaccaacctcacatctaccacctccagcctcgaagcctcttgcaggggcgaacacttccttgctggaccatgcatttgctcaaaccaccctgctcccgactcctcttcctggttctctgacttagccattgcccaggcgtcccctcccctcgccctccactgctgtagtagctcccgtgtcctgcatggggctcacgaggctgactgtgcatccttaggaccagctccagcagaagatcatgtgccccgggcctgtcacctgtctgactgcatcacccaatggtctctacgtcctggcaggagttgcagaaagcatccacctgtgggaggtaagaggagcaaagcgtgagcgtttcccacaggacatctcagcccatctgagctttgcctgcagggcaccagggaacaaccatgcggcctggggccctgggatgggtgactgctcaggggttatagcctaagcttcaccctgctgcctcctttctccaggtcccctcgagacttgcgaatcccagaccagccctaatcctgccttgagtgcttggatagagcccggtgcagcccagtccccggcactcacacaccgcagcatcttccagggctagcgggcatctcttccacgcaggcggcagcgcctggcacttgtgacttgaaagttataaagggcggccgggcgcagtggctcatgccggtagtcaatgcaacctctgcctcccaggttcaagcaatcctcctgtctcagtctcctgagtagctgggattccaggcgcccaccaccacacctggctaatttgtttgtatttagtagagaagggcttcacaatgttggtcaggctggtctccaactcctgacctcaggtgatccacccgcctcggccccccagagtagtgggattacaggcgtgagccaccgcgcccggccagtgcctcctttttcttaccgctggaccaaccaggtgacagcaactcctagacacactcacagcccggatcctgccatgctctcactgcgagacagagtgaactgttcaggctttgcatttaggccagcttctcagctctgccctggtgaggggaagcagccctggatgatgtgtgagtgagtgggcacagagatgtgccagggagacttcattcacaaagtcaggcctcttggagtttggcccataccgtagctgtggcgttagatcaccggctgtgttgtcacaaatggtccattatatttcgggggagacctgccctcaaccccacatagagcagggcagacagtacaagatctggggccagaagacccaaaggtaaccatgtttctgcccttcctgaccttgtccttgcttccctcagtgggctgctcagagaactgagagggctgggtgggcatgagcattctcggagagataaaaaagccaccaggggatgggcatggcggctcatgcctggaatcccagcactttgggaggctgagacgggcagatcacttgaggccaggagttcaagactagcctgggtaacatggtgaaaacccatgtctgcaaaaaatagaaaaattagctgggcatggtggcatacacctatagtcccagctttttgggaggctgaggcatgagaatcacttgaatccgagaggcggaagttgcagtgagatgagattgtaccactgcactccagcctgggtgacagagcaagaccttgtctccaaagaaaaggggggtcgggacaggcagcacaggaatgacaggaggcatcattatctcaccctcaggacacgtgtgtatgtatttaatttttaaacttatttttgagatggggtctcactacattgccgtagctgctcttgaactcctgggctcaagcgatcctcccaggtagctgggattataggcatgtgccaccatgcctgggatcccaaggcttttacatctcactccatgattttgaaactaggatgcagttgctgagagggaaactgaggcagggaagcagtagctcacgagtcacccctaacagtagacctcctagccctggttgctgtcagtctggtgcagaggggcatgtgggtaggaattaaatgtgtcatcgccccatgggggatgtcttaggcgggaccccttcctgttcttggctcgggacagtgtgctgggtggcacccactgccagacccctgctcccctagccgcctccagtttttttttttttttttttttttcagatgaagtctcgctctgttgcccgggctggagtgcagtggctcaatctcagatcactgcaacctcaggctcccaggttcaagcgattctcctgcctcagcctcccaagtagctgggaggcgcccgccaccatgcctggctaatttttgtatttttattagagacggagttttgccaggttggccaggctggtttcgaactcctggtctcaggtgatccgcccttctcagcctcccaaagtgctgggatgacaggcgtgagccactgcagctggccctcctggagagtttctgacccgtgagctgtgaccatgaaggggtgtcccacatagccagagctcaggccgggactgcctccactgtacccccctgccacggtcgaaatcctcctcctgttctctgtgtaggcgacgggtgtgtgagcggtgagtcaggagtgggctggaaacctgagagccagggctgtggggcgggagctggtccgcccctcccacgccacagggacagggacctcccgggaggcactgatgttctgaagctgcccggtctgtcccggccctgggcagtggtggtcaccagagctgccctctgtggtttggggctgacctggatcctgcttcctctggtgccatttaaccctccccagccaccctgggttttgcatgcgaggaaagcgaggcccagagagggcatggctgtcagatctgggcccagcaggctctgcctgccccaacaaagcacgacgcacagggactttcgacaacagaaactcggcccccatccttgaggccagacgtcctaaatcaagatgtctgtggggccacgctgcccctggaggccctgggaggagccttcccacctctccggtggtggccggcaccccttggcacccttggcttgtgggtgactgtcccctgcctctgctgccaccactgccgcgtggagcccctgtgtgtttgcacttctctcagcttacaacaaccgggacacatggatggatgcccccgctccagaaccacctcatcttaacttatgatatgtgcagagacactgcgtctaaatgaggccattcacaggtcccaggtcgggacttttaacatgcttttggggggaaacacgattcaatccacaacccccaccagagcatctcagctctcgaatccacaaccccccacagagcatctcaggcctcgaacccacaacccccaccagagcttctcagccctcgaacccacaaccccccagagcatctcagccctcgaacccacaaacccccccaagagcatctcagtcctcgaacccacaaccccctccagagcatctcagtcctcgaacccacaaccccccccagagcatctcagccctcgaacccacaacccccaccagagcatctcagccctccccaggtgtcctggaaggggctccctgtcctcttcctcagatggagctgcctggcttcctgccggagcttaagctgccaccaccctgggtcaggccaccacagcctgcccagaagcgacttcctgttgaatggtgggagccgcctgcaggtcctgagtgcagccgttcctacggggcccacacaggacgcctggggtcaggctcacaggggaccagcacctccctgaggcagcagggaagggcaggaaacttgccccttcctgggccatcatgcaggtggggacgaggcgggaacaggtgcccacccagcccaggcaggggcgcgacgaggccccgctgtacctgctggccgctgccctgacagggtcaccccgcagtcctggggcagggcaggcagggggcgacagtgtggccatggccgtgcagtggtgggttcctggggctgcagcccccctttcctcccctggggctttcctcccctgacctggataccctctgcccctcacaggtctccaccgggaaccttctggtcatcctgagtcgacactaccaggacgtctcctgccttcagttcacaggggacagcagccacttcatctcagggggcaaggactgcctggtgctggtttggagcctctgcaggtagcgccttgcgcactcaggcctgcacctggaactgcacccgggctcaggcggggagaggaggcgccaaggcccctggcgggaaggggcttctctcttgggggctggagtgcagaggacggagtgatcatcccaggggtcctggctgcccacactggggtctggtttgttctgggggccgtgggggcccagccttgagtttactcaggtgaggcaggccaggctgctgagtggaggcaggtgtgtgcgtgaggtgggtgctggaggcgtggactgccctgttccctccgctccccgcctgctgagcacctgccccaccccgctcagcgtgctgcaggccgacccctccaggattccggcgcccaggcacgtctggtctcaccacgcgctccccatcacggacctgcactgcggctttgggggccccctggcccgggtggccacctcctcactggaccagacggtgaaggtacgccgcccccaccccaccacggtccatgagcggagcccagcagccgcaggtcctcagccaggaatgcaggaatcgcctcctcccgctccctgctgtcaggactccagacggcttttaatcccctggtgctctgagcccaaggacgtccagggaggtctgccagcctggaaattcctactcattcaccgtttctggcccggctccctggccaagcctggggaatcggaggtcatcactatgcttgagtcgtgaccggtggtcctgggagggagaaccaggggtcatcagccggagaccaagctccatttcagcacaggccatgtcccctggcccccaagacccacatggtgacggctttcacccaaagtcgcaagccctagggccagaggacagccgacgcctgacctccctggtgcccctgttcccatggggtcctcgggttccccctgccgggccgagccccacgccctttgcccacccgcagctatgggaggtctcctcgggggagctgctgctctccgtcctctttgacgtgtccatcatggcagtgaccatggacctggctgagcaccatatgttctgcgggggcagtgagggctccatcttccaggtcgacctcttcacctgggtgagtgccgcggtctgcgggctgcaccctgccctggggctgagggcatcgggcctgcggctcacacacgtctcggccttcgcagcccggacagagggagaggagcttccacccagagcaggacgccgggaaggtcttcaaagggcacaggtggggacgtgggaacggggcgggggctcccaggcacgtcctgtctggcacgtcccaggtgacccctgtctgtctgtccaggaaccaggtgacttgcctgtcagtgtccactgacggcagcgtgctgctctcaggctcccacgacgagaccgtgcgcctctgggacgtgcagagcaagcagtgcatccggacggtggccctcaaaggtgggcgcgcctctgctcggcccgcggccagcgcgcaggggaaaaagccagcaggagctccgggcttggcttgggtgggggcggggactggtttgctgtggggcggggccgggctgggggcgtggactggctgtggggcggggcctggctgggggagtggactggctgtggggcgtgggctggctttgctgtggggcggggcctggctgggacggggcggggcctggctgggagcgtgaactgggtttgctgtggggtggggcctggctgggggcgtggactggctgggggcgtggactggctgtggggcggggcctggctgggggcgtggactgactgtggggcggggcctggctgggacggggcggggcctggctgggacggggcggggcctggctgggggcgtgaactggctttgctgtggggtggggcctggctgggggcgtggactggtcgtggggcggggcctggctgggggcgtggactggctgtggggcggggactggctgggggcggggactgccctggatggggcggaacttggcttgctgtggggtggggcctggctgggatggggcggggcctgacctccgcgccccccaggcccagtcaccaatgccgccatcctgctggcgcccgtcagcatgctgagctcagacttcaggcccagcctgccgctgccccacttcaacaagcacctgctgggcgccgagcacggggacgagccgcgccacgggggcctcactctgcgcctgggcctccaccagcaggtacggcccccagcagggaacccccactgcccttttgtcccggaagaccccgcgggccctgggctccttcgctcccttggtcctggcgcccgtgcggcggttccccacaagcccggcactggagggcgcgtcctgtgagtgggatggtgatgctcggtggggcctctgcccactctcagtatggacccagaggctctgagaagttaaccacccctcttcccccggccagcagggccgagctgcacgccccacacaccagccttcctgcggctggatatctgacagtcagttaggtctttctgcaaaaggccgatgccccatacttcgggctgtgagagccaaaaggttcacgtctgggctgccgaaggtgcaggagcagccgtgagggcagggagcgggtggggccctggtggctgcaggtggctcccacgtgggctgggggcagcctctcggcctggccacagtcacgccctcactccctgcagctcagcaccgacccccgctctgtgcaggtactagggtgggctcccttaccttctgagggtagagtgacttccggaacacttcccaccccagccccaagaccctcatagaagccagtgtggttggctgggctgggctggggtgggggctgggggttccttgggcctggggaggcttcccagtgtgtttccgcctcactccccgaccttcgatgagctgcctgcgtccttggtgtctcacgtcactgtctgtgtccctcgctgggctctggcgcttggcacttctccccacgcgccctcttcttacctgagtacagattgatttttttatctggagggtgcccgacagcctgatggcctgacaggccctgcaccaggagatgccgttatctcccttgtccgtgcttcctcatggagtgacactctgttttcccacatctaccagtgggcttggggcgggcaggcaggggaccgccaccgtctgggcatccgcaaggcccctcagactgcaaggaggccaggagcacaggctggactgactgctaacagcgtgggcgcaaggaggggcgagctttttgttcagaaagtgccggaactttcggagtgaaaacaggcctccagcggcagagccagctccacgctagggcgcctgcccggccactgcctcctcctagggcagcagcggttcccacgattcctgcccagccaagcgctctccctagaaccccacctagttggccacagtgggattccggagggggccaggccatgccctccggtaatgccgccacctttccctagccgccccacctggctcccttcctcccgtgacggctgctagtcctctgtgacccttgttccaatccagctgacactggaatgttggcctgtcccacagacaggcgctgctggggcccaaggcgcttcgtccaggaggcgggttcccgacctctgatcccccagcaacgtccctccatgtaactggttcctctgtacagggcagtggccttgctgggccggccaggctctccccatggctggaggtgctcactgtctgtgaggccctcgccaggccctgtgtcccagagccttccctgggcttgcgggtccttccaggtctggcccaggcccctgtctgtggtgtggccatctgcacccccatccccagccacatccttgggcgcagtcgtggaggatctgaggcgctgggtaatgactgcatggccagggtcagggttgtcatctgcaggctcgacggaggtgaacgcccccgtctcagtcttcccttctgtctgtgggcgtcacggtggcccctccctggctgagtggctgcccacgctggcgggggtgggatgggcaaagcgtgtggtgtgtgacaggacgcgccccgaggtcacgtggctccctgtgttacagggctcggagcccagctacctggaccgcacggagcagctgcaggccgtcctgtgcagcaccatggagaaggtgggcggggcctcgggaggggcggggcctgaggctggggtcagtcctggccagtgggggtgagtggcccccctccagcacaccccaggccacttctgccctctgaccccgacttctcccgcagagcgtgctcggcggccaggaccagctgcgcgtccgtgtgacggagctggaggacgaggtgcgcaacctgcgcaagatcaatcgggacctgttcgacttctccacgcgcttcatcacgcggccggccaagtgaggcccggagaccccggcccgaggcgcccaggcctgagccccatgcctcccagcaaccagggcccgcgggtgtggcccccaccagcccaggcctggactctcctcagttctgtgtcgtgttcgggtttttcctctgtgactgggccgtcttggtgtctcgtggcacgcgtcacagtggtgctagtctgtttttaacaaaagaggatgaaaagcccctcctctccggcctccttgtgtccgggtgtggcctggtgctgcgtgcaacacagctcccctgctgctcggcccagctgggaccccagccccactcggcaccctctgtccggaggtgggggccttaaccaacctaggcctcgcgggggcggctttaagagggagccccgagcacctgcagttctgactctgctctgttgcccgagggcctttgcatggccgccccctcccgagaaggcgctggaccggggtggtgggattgaggaaggaaccgggaagccaggcccctccggtctgctgtgcagggggtctgagtggagacagccctgtggggtcccggaaggaggtggcttggtgtagagagacgggcctggggacgtttgggggtggacccagccgccagggttgaggggtttccccgggtgcaggacccagctctcagggagggtttcgggggtccctggtccctgtggaaacgcagggctcaggaccaggcaggaggagggagctggtgtgggtggggccttggagcacaggctcctcccagtgcatccctcgggtgccttggggcccctgctggcttccccagggcccagctggagccgcccaagggtgaacccagggtggttctccgggcaaaaggtgccacggcctccccaggcagaggtggcttgccccacccagcaaaggtggccactgcaggctgggaccgtcagatgggtcaggagcaggtctgggggtggtgtcccgatctgagccggtccccagagggagttggacccctgccacaccacaagccgtgcttgtgggtatcaagggcttgagggaggtcaggccctgctgccctggggacgctgccacccagcgcctggatcccagcccagaagcccagaaccttccagaaagctgctcccgactgacagtcctacctaacgatccagaaaatccgtgtgatttagcgggcgtggtaatgaccgcagtccagccagccgccagcgctgagttcatgcttttaggctaatttgtgttcttgtcccctctatggggctctgagtcctctcggctggcagcctggccacactgcatcagggcagctgggccctcacctggcactgacatctgcctcggctgctccgagccctgagaaccactccagggtcccttccccctgggcgcacggccagcttgttccttttccatcatgaaccactcactctgctgacctgcaaggctgggtcctgcctgcggggagcacgcggatttggggtgaggcagctggggggtcccttggggttggctgatctccctgggtctgtacctactgttcccctggagccattcccacgacccctgcccccctccgcatcaccacccaaaggctcccaaatttccctcccagcaccaatcaggacccccaaccaccaactcaagggtatcggcacaaccctgtggctggtgccagggcggggtgagggtgcgcagagccgtagagggacagctgcctggggctcccagggcccggactcggctccagccgctgcaagagcccaaggtgagccaggcacgaacatccaggtcacttcgcagctgcctgcaccacgcggccgtccggggctgaggtcggctgccctctccgcaggctgcagaacagggttagagttcaccgtggggcagggcccgaaaatcgcccggtggcctcagacaggcgacacctggccgggtcggactcgacgttcttgtctccagaaaggggtcgtcccccggcgggtcggctgggagctgggcgggggcggcaggagctcacgcctcattccctgcgtttccctccatgtgcccctgcacgctgggtccttggacacaagccccctcggtgcctctccacgcccgctcccgcaccgtcatcaccctctcggcccagagctcccagacgtgctcaggcaccgcggctccaccctgcgtcgtaattgccggtctgggtgcgatggaaacagtggtgacgtcatcgttcagaccccccgcccccggaggccccacagattctcagagggacggcgccgggactggggaggccaaggcgttgacgagcggggacgccggtgtgcacaggtgacctggcggctggcggggcttgactgtgcagaccacagtgaggtgcgcttgcgggcgccgggacagctgccagcaaagctgagagcagaaaacatcatgcgcgaggaggtggggaagccacagccttcccgtgccctggtgcggacataaaatggggcatccactgtgaaaatagtctggcaggttttttgtttgtttttgtttttgtttttgtttttttgagactgagtctcactctttcccccaggctggagtgcagtggcccggtctccgttcactgcaacttctgcctcccgggttcatgccattcccctgcctc[222 bp omitted]tggacccagcgagtccacttctgggtatatacccaagggaatgaggagcagggtttgggaatgaggagcggggtttgggaatgaggagcggggtttgggaatgaggagcggggttttgaaatgatccacacaccaagctcacaacagctccatccccacagccaaaaagtgggggaaggccaggcgccgtggctcacgcctgtcatcccagcactgttggaggccaaggccggtagaccacctgaggtcaggagaccagcccggccaacatggtgaaaccccatctctactaaagatacaaaaattagccaggtgtcgtggcacgtgcctgtaatcccagctacttgggaggcttaaggcagaattgcttgaacctgggcggtggaggttgcagtgagctgagattgcccccctgcactccagcccaggtgacagagcaagactccgtctcaaaaaaaaaaaaaaaaaaaaaagttggggaaaccaggtgtccatcagcggttggatgggtcaccacaacacgagtcctctgcacagtggaatattattcagccttgtaaaagaacgagaaggctcaatgcagtagctcaccctgtattccagcactgtgggagctgaggcaggataatcgcttgagcacaggagtttaagaccagcctgggcaacatctctacaaaaccccatctcttcaaaaaatataaattttagccaggtgtggtgtgcacctgtggtccccgctacttgggaaatcaaggcaggaggatcgcttgagcccaggaggttgaggctgcagtgagctatgatctcactactgcgctccagtctgggcaacagagcgaggtgcagtctcaaaattaaaaaaataaaataagtgaggctcagacacaggccagagcatggttgcaccttgaggacatcacactcagtgagagacgccagacacaaaaggacacgtcctgtctgattccactcctaggaggtccctagagttgtcagattcacagagacggagaggataggaggcgtcagggctggggaggggacggggagtgagtgtcccctggggacagagtttcagtttgggaagatgagaaagttctggacaggagggtggtaagggctacatagcaaggagtgtgcttaatgtgcctgagctgtgcacctagaaatggccaagatggcaggtttcatgttatgactattttcccacaataaaacattttttaaaagtctcctccacgtggccacttgttccacatggcagctgggagtaggaacgcctactgttgcccgtgtacagatggggaaactgaggcagggcacgagggtgagttcccggagggcagacacagtctctgcccctaggaactcttgctcctcagagggagccgaacccagggagggacggggccccagtggtccctgaggacaccaggacccagcacctctcgcagacccagggaggggaccccttgtcctgcccccggggacacctggccagggggctggagggggtggcctgcgggttcctggaaccgagccatccctccctccgtccctccccagtcgtctcaaaatccaatccattttactggctggcacttggcattttattcatttcatggaggatttttttcctacctctccaacgctggctccaaaaggagatgacgtttggggtgtgtgtgtgtgtgtgtgtgtgtgtgtgtgtgtgtgtgagaaaatcgccggagtgtagatccattaattagagctgaatgttcccaacacagcggctgttctgctgccccgcgggatctggggagacaccgtcgggaggacaggatgaggaatgcctgggcagggaggaggtcctctgctagatggatagacggatgcagccgcccccatctatcaggcgcctgtgggatgccagggccccagaaggcaccccccgaggcccagaggacataggcaggcttggggactggtagacagcggggagctatggaaggctctagagcactggaggaggggcatgtgagcaagcatccttgtctgggccgttgctcaagccacaagcaattatagagtgcctactgtgtgccagcaaccaaaccagacccaccccaaccctcccagagctgagttgaagagatggtcactaaataagaaggaaatgaacaaaaagatggtaggccgttatggaaatgtgtggaggttgggggtgggtagcagcaggactgaaatggggcagggagtggtgctttctgcattttctcagtggcaagcagggaacgtttttcagggcagggcatttgggactgggttttgaagggtgaagaggagttctgtggcccaagttgcctgcccactgctggagggcagatctactctataggtttccatcagacatgcctgtctcagtttccccagggtgcactggatgttagaacacacccctgggctggcctggttagaaactgacagctccctggatgtgcgagacaagcaagacccttcctgggcctcaacttccctgcctgagcaatggtcgacattggtggaaggggtcagggatcctggagaggaacggggtgggcgtc[132 bp omitted]tgcctcagcctcccgagtagctgggattacaggctcccgccaccacgcccggctaatttttgtatttttagtagagacgggctttcaccatgttggccaggctggtctcgaactcctgacttcgtgatctgcccgcctcggcctcccaaagtgctgggatgacaggtgtgaaccaccgcgcccggcaagtcggggccaattttaaagcgcagtcttttcctggcacctccgttccatctgtggcctgaatcagagcagggatgggcagtggttaggcgtccccggcccccgccaggtgtcaccgccgccggcctcaaacaaccactgggaggcactgtttcccccccatcccgccctgggcagggcacgtcccactccccccgcgcggttgctgggaacccggaggccgcccgggcggagcgcggagggcgcgtcggaacctggccggggccctccacccgcgccgtggtcccggtggttgcgccccgtggcgagcgacgccgacaactttgcgatggagtttgtgcgggcgctgtggctgggcctggcgctggcgctggggccggggtccgcggggggccaccctcagccgtgcggcgtcctggcgcgcctcgggggctccgtgcgcctgggcgccctcctgccccgcgcgcctctcgcccgcgcccgcgcccgcgccgccctggcccgggccgccctggcgccgcggctgccgcacaacctgagcttggagctggtggtcgccgcgccccccgcccgcgaccccgcctcgctgacccgcggcctgtgccaggcgctggtgcctccgggcgtggcggccctgctcgcctttcccgaggctcggcccgagctgctgcagctgcacttcctggcggcggccaccgagacccccgtgctcagcctgctgcggcgggaggcgcgcgcgcccctcggagccccggtacgcgggacgcccggagtcaggacgagggggacccggggcgggagcggggtcgggagccctggggacgtccggagtcaggatgggggtgccgggactacgcagggaagggggatcccgggacgctggacgggccccagggatcagggatggggaagacccgggtgtccccggagcaaggaaaccagaacccagaggaagagacccaggggcagggacctagacgcggggttgagagctccagggacgcccctggaacgcccctgcagaccccttcccagcgccctggtgatggggaccccgccactgtggcctctgccccttccttgcccaggccccttccctccttccccacagacccttccctggtccctgggacctcctggtccccacccggctctgggtggctgggctggaggacaggcggtctccctcctcactctaggggtgcagtttcggggtctgcaggtctggatctccctccttccagcattctccccgtcccctcccagaggcctccaagatcccagagcagcctccatcattccaaccccgactccattcccaccccccaacccctggcagccttcaagttcctctcttctaaccccaccccaggcccagatcccgggaggaaacggaagaagagaagggcgattgactgggttctggggtccctgttgtcccccccaacagggctcactgcgccccagataacaagccccctcccgtggccagcaaggaggtcccaactccggacatgggcctggctgagctctatgccccagctgcccctccttcccaacccactcagaggcccctccagcccctccctctcctcagggagggagaccctgacgctagagggggggtctcttagcccagctctccaggtgtcaaggggacccctgtccccccaccgccctagggctggtgggagaggcggggcccaaacccaggcctggggcgccctctgctgccgtctccaggagctgcaccgccgcaagccggggcgtgggaccgacctagcgtcttagggactggcttggccccctggggactgagccccatcccaagcccatcctccagcactgggcaccctgcttccaccctgggaagcgccctgccaacccgaggggcctggcaaagctctcccacctttaatatactaagttaaatccagggccgggtgcggtggctcacgcctggaatcccagcactgtgggagcccaaggtgggaggacagcttgagctcaggagtttgagaccagcctgggcaatatggcgagaccccatctctacaaaaaatacaaaaattaactgggcgtggtggtgggtgcttgtaatcccagctactcaggatatatatatattggctggg[138 bp omitted]aaagctgggagtggtggagcttgcagtgagctgagatcacgccattgcactccagcctgggagacagagcaagactccatctcaaaaaaaaaaaaaaaaaaatccaggagaactttctggatggcactgggcacaagggggcccctcagccctccatgtgcctggcacggggcagtaatgtgtgaaggggatgctaggggaagctacctggtttggctctaagcacaaggccatcggtgggctcacctttatgagccacagctcttggccctagaggggttcccaggcaggtgggtgccaggtgaggtcaggactgtaaaggaatcagggagggacctgaggctggaggcgttccaagctggagcctgggctctgcctggaggatggagaagtctgaatagaggaggagcaatgtgcttgggttttgaaggatgtgtaggagttggtgggcatagagagagaaagatattccatccggggaatggcacatgcaaaaaaaaaacaaaaaacaccaagtgtgcccatgacaagggtagctggagccaagagaggctgggagactgagctttgtggggatggtgatggggaacgatggaagggtttagagcagggctggggctggggggaggtggaggggaggtgcagccatccagctggcatctacttgcggatcacccgctgctggggtgggaagggttttgtgggggtggaggtcgtcaaccctaaccgtggccacccctctcccagaacccattccacctgcagctgcactgggccagccccctggagacgctgctggatgtgctggtggcggtgctgcaggcgcacgcctgggaagacgtcggcctggccctgtgccgcactcaggaccccggcggcctggtggccctctggacaagccgggctggccggcccccacagctggtcctggacctaagccggcgggacacgggagatgcaggactgcgggcacgcctggccccgatggcggcgccagtggggggtgaagcaccggtacccgcggcggtcctcctcggctgtgacatcgcccgtgcccgtcgggtgctggaggccgtacctcccggcccccactggctgttggggacaccactgccgcccaaggccctgcccaccgcggggctgccaccagggctgctggcgctgggcgaggtggcacgacccccgctggaggccgccatccatgacattgtgcaactggtggcccgggcgctgggcagtgcggcccaggtgcagccgaagcgagccctcctccccgccccggtcaactgcggggacctgcagccggccgggcccgagtccccggggcgcttcttggcacggtgagtggggaccctgcttcccttaggagggtgtccaggc[131 bp omitted]ccggccaacatggtgaaaccccatctctaccaaaaaatagaaaacattagctgggcgtggtgacacgcacctgtagttccagctactcaggaggctgagatgagagaatcgcttgagcctgtgaggtccaggctgctgtgagctgagatcgcaccactgcactccagcctgggcaacagggaccctgtctcaaacacacaaagtcaggatgctttgttagatgtcttaggtccccggaagcagtgcccacctggggaactatctcagggacagcagagaacgagctgaacaactaggagggagggaacgggtctctggctgagccctggaggagttcctgagaatgaacaactcctggaaacaggtgaccccagctgggtgcttgtgtgtcagtcactggcttcaggcgtatgtggagtgggggcacagccacggcatcgggcacggatgccccgggatcaaggggttaggcttggggactaggcttggggacaccaggagcgtccacgtttgtcctcatgatacggacaagagcgaccagtgggaatcgggcacgtgctgggcaggggtgagaggatggaggggtgtgaacttcgacacctgacaccccccccgccctgcccctaggttcctggccaacacgtccttccagggccgcacgggccccgtgtgggtgacaggcagctcccaggtacacatgtctcggcactttaaggtgtggagccttcgccgggacccacggggcgccccggcctgggccacggtgggcagctggcgggacggccagctggacttggaaccgggaggtgcctctgcacggcccccgcccccacagggtgcccaggtctggcccaagctgcgtgtggtaacgctgttggaacacccatttgtgtttgcccgtgatccagacgaagacgggcagtgcccagcggggcagctgtgcctggaccctggcaccaacgactcggccaccctggacgcactgttcgccgcgctggccaacggctcagcgccccgtgccctgcgcaagtgctgctacggctactgcattgacctgctggagcggctggcggaggacacgcccttcgacttcgagctgtacctcgtgggtgacggcaagtacggcgccctgcgggacggccgctggaccggcctggtcggggacctgctggccggccgggcccacatggcggtcaccagcttcagtatcaactccgcccgctcacaggtggtggacttcaccagccccttcttctccaccagcctgggcatcatggtgcgggcacgggacacggcctcacccatcggtgcctttatgtggcccctgcactggtccacgtggctgggcgtctttgcggccctgcacctcaccgcgctcttcctcaccgtgtacgagtggcgtagcccctacggcctcacgccacgtggccgcaaccgcagcaccgtcttctcctactcctcagccctcaacctgtgctacgccatcctcttcagacgcaccgtgtccagcaagacgcccaagtgccccacgggccgcctgctcatgaacctctgggccatcttctgcctgctggtgctgtccagctacacggccaacctggctgccgtcatggtcggggacaagaccttcgaggagctgtcggggatccacgaccccaaggtgggcggcctcggggggctgcgggtggccttggggggctagcggtggccccgggctgggctgtgtggggcaggggtggtcagctggacgtggaggacgtccactaggccaactctggtccc[137 bp omitted]ccaacatggtgaaaccccatctttactaaaaaatacaaagaattagctgagcatggtggtgggcacctgtaatcccagctactcgggaggctgaggcaggagaatcacttgaacccaggaggcggaggttgcagtgaatcaagatggcaccattgcactctagcctgggcaacagagcaagactccgtctcaaaaaacaaaaaacaaaacaaaaaacacagagatggggggctggctat[141 bp omitted]ggctggagcgcagtggcacgatcttggctcactgcaacctctgcctcctgggctcaagcgattctcctgcctcagcctcccaagtagctgggattacaggtgtgcaccaccaagcctggcttttgtattttcagtagagttggcgggtttcaccatgttggccaggctggtctcgaacccctgacctcgtgatccgcccacctcggcctcccaagtgctgggatcacaggtgtgagccaccacatctggcccgtattattattatttttttttgagacagagtctcactcttgcccagagctggagtgcagtgatctcagctcaccgcaacctccacctcccaggttcaagcaattctcctgcctcagcctcccacagtgctgggattagacgtgagccatcgtgcccggcctccccttgtaatttcttggcaaagtcgggttttctgccccgtagtgtctctgaacttttggatctgcccagtggtgtcccctgggggtgcctggcctgctccccagcccctggtgtcccctgtgaaacggtagtaaagcgtagacgccatgctgtcaggtgagccgactgctgccggcggctcttccaatgtaaacgctgcacagctgagccgtcaaagccttttcatcatacggaaacttccatcagatgctgctgacccacaggcacgatgggattcaagtttgggtttttggtggtgctggaatcccgtggggaggccgtggctggtgtgacctcagcagccagacccacctactcattaggggtctgcaccaggttgccctggcagctgtggggagaacagaccacgggtggtgcagggaggaccccgcagaggggcctgggctggtcgaggatgttgatggggaaggaggctgggttcgacgctgggccccaacctgggtaggagctgtggaggggtgagcagtgggcagttccctgtgttgcaggtggcgccccccagggttttcgggagaaacagggtgtcagaggcagtgacgacagagctgcctccgcctggggtgggaagagcgagtgggggcagatcaggagtggggtcatggacatgttagagtggggctcccgtgggacccccaggggagaggcagaggaggtggtgggataggcgtccagcccagggcgaggtccaggtggagatggacttgccggcgtttagaacagagggtctccacccggggtgatcctgccccccgccccaggggaccctggacagtgtgtgtctagagacagctgtggtggtcacgcctggggtgtgctctgggcatggagtgggtggaggccaggaatgcagcctcggcgccctgcagtgcccaggacggccccaccccggagaacggcgcgcccctcaatggtcaggggtcctgaggggcaggcagaggcgctgacggggtcccccgcgcagctgcaccacccggcgcagggcttccgcttcggcaccgtgtgggagagcagcgccgaggcgtacatcaagaagagcttccccgacatgcacgcacacatgcggcgccacagcgcgcccaccacgccccgcggcgtcgccatgctcacgtgagcccgggcgcggggtgaggcgggggcggggcgtggggtgggcggggcgatggctgacccccgcccccggccccagcaggagcgacccccccaagctcaacgccttcatcatggacaagtcgctcctggactacgaggtctccatcgacgccgactgcaaactgctgaccgtgggaaagcccttcgccattgagggtgagaggcacctgggcgaggcggggcgccggggtctctggggacctcctgggggcagtggggagccacggagggttcgaggtgggaaggggcgaaatcccacgtgtgcgggcagagttcccctggggctgtcccacctggccccaccgcctggccccgcgcccccaggctatgggatcggactgccccagaactcgccgctcacctccaacctgtccgagttcatcagccgctacaagtcctccggcttcatcgacctgctccacgacaagtggtacaagatggtgccttgcggcaagcgggtctttgcggttacagaggtggggcagggcctgggacagagggtgggggtgggggtgggcgtggggggccctgagccttgtctgaagtgaccaaccccagtgctcattccccagacgtgcgtttgtctgcttctgcgcacttctattcaccctacaaaaccccggctgcagtgccccttcctccatgaaacctcactccccccagccatggagtccctgcctcccaacctggctccactgccccaagcccctctctctggcccaacctgttctcccctagttcaaggctccccaggggcctgccattacgtgaccgtgcggggctcctgctgtgttgcccccagaccctgcagatgagcatctaccacttcgcgggcctcttcgtgttgctgtgcctgggcctgggcagcgctctgctcagctcgctgggcgagcacgccttcttccgcctggcgctgccgcgcatccgcaaggggagcaggctgcagtactggctgcacaccagccaggtggggagcgggtgggcggcgggcggccccaccccccccgcctcctcgccaaccgggtctgtctggggtcttagaaaatccaccgcgccctcaacacggagccaccagaggggtcgaaggaggagacggcagaggcggagcccaggtaagtggtggtcggggcggaccacgatgcaggaccacccagacccaccaccccaccagctcgccccgaagccggccgcggggtgcaggaggttcccggaggtcccccgcccacccccggacgtgcacaccgtggctccctggttgtgcctgtcggccatcctctgccgtcagcggcctctgcagaggcccagggcgcgagacggctgccccggcggacactgaccaggccggttccgtccccagcggccccgaggtggagcagcagcagcagcagcaggaccagccaacggctccggagggctggaaacgggcgcgccgggccgtggacaaggagcgccgcgtgcgcttcctgctggagcccgccgtggttgtggcacccgaagcggacgcggaggcggaggctgcgccgcgagagggccccgtctggctgtgctcctacggccgcccgcccgccgcaaggcccacgggggccccccagcccggggagctgcaggagctggagcgccgcatcgaagtcgcgcgtgagcggctccgccaggccctggtgcggcgcggccagctcctggcacagctcggggacagcgcacgtcaccggcctcggcgcttgcttcaggccagagcggcccccgcggaggccccaccacactctggccgaccggggagccaggaatgaggcggcagccgggccgtttgggctcaagacacacacacagcgcagtgagccgctgtcaacagacagtttattctatatacaaacacaattttgtacactgcaattaaatagaatggaatgagcgctcctccgcattcctccccgagtgactggtttggccgccggcccactccatccccgagtgggactggaccacggccctggctgctgccactgatgttggcgcctgcaccccacgtccctatgcccgaggcgcaagctctgctctcccggggaccccaagcctggcgcacacgcggggagggcggggccatggagaaggcactgcagggagcaccaggcagagccgggctgaggccggccggcactagggcgcgaggccccaccccaagccggcctctcctccacacctccgccttgctcagagacctgcaccatgggaccccactccatcctcaggacggttcactgcagacctaccaagacccctccagaaccttccgcggaaccccaccccctctccttgctgaccagctcaaacacctcactagcgggtacaagcctcgggcgcgacctcacaccagggggaggaaagccgccttccgggcaaaccccacgaaaccctgaaagcccccgacacaggctgggcagtcccagaggaaggaggtggctggcctcccccacccccacgggctcgggaaggtcaggcccagccagcaggggtcagaggcggctcagctgtgcggctcaggaccccacctccgagggcgcctccgttggggccatggaggccgggctaggcccgcctaccgcagcccccaggggagttgtgtcagaagctgcggagtcactcggggggacactgtcctggggggcgtgggggaggcccccagcagggcccagcgggctggctggacgccgctccaggagggaggcgctcaggccggacaggaaggaggcgtctgtgatgatggcagcggtctctgccatccaacccaggtcaccaccggcagctgctgccactgaggctgccgcggccaccagggagctgggcgccgctgccacaggcccgggactcccgctggccccaggcgagacggggcccagggcggggggctggccggcagagtcaggggctgtagccggggcgcccgagttgttgttcatgtcatcgggcagcgccgtgggggtcccggggcccagtggcggcgcctgaagcagcatctcctggatgcggacctgctgcaggatggcaggcagctcgtagtggtggaagaagtagatcatggaatgctgcgggagggagagtgggagtcaggacgggcccgcccctgccccacccagccgctgctcccagagggcagcccacccgggaccatccacgctacctctgcccgcttgggccgaccccacagggcatcctccccggctgcagcctctcctgcctggaaaggcacggctggcctgccccctgcttgccgcccaggcctcacctggatgaagagccaggaggtgaccagggccaggctgctatactgcccattgaagcggtagtgataggcatagaaggcgaagtggtagagatagaagaacctgcggggcggggtgagggcgtcggggctgcaggtcccaccctgccaggcccagcccctggggttcccgcgtggcgcagccaccacccccgcctccagcgcccctccctctggcagccccctacccctgcccaccagcacccactccaccctgcccccgcgccacgctcaccgcagccaatgccgcttgctggtgctggtgtggcagcagatggcgtcatactggtccgcgagccacacgatgaggatgatgtagaaggcggtggtggtgtcgttgaagaactccgacatgatggcctccatccctgcagggagaggcggcgccggttgaagcgggcggggcggggtgcagcgcggggcgggggaggccgggtggggtcctcaccgacgagggccaggatgacggtcagcaggggcgctgcggggaaggcgatggccatgttcatctccagcatctgcagcaggtccactgcgggcacagggcggcgggcgcccggtgagggcctggaggacgcccgccccgccctgcgccggcgggacactcaccgatgaagacgaagatctggtggtgtgagtaccgcagcagcatggacacgctcagcgtctgcaaggggcgcgcaggaagcgctatgaggggctgcgagggcctgcttggctcccgcccggccagcccccgcacccgccccgaggcactcacgaagatgaccatgatggcgaaggcggccaggtaggacgtccgcgccatccacatgctcacaaagcggtagtgctcgcccgacaccacattccgcaggaagcctgcagcagaaggagccgtgagcgcccgcccccacccgcgccctcgcaccctcggccccggggcatgcctcacccttgttctcctcgttctcggccaggcccttcacgctggacatgaggatgtcatcgtagcccaggaactcatccagcagcaggcggctgaagcggtccccgaagcactggtcccgcgtggggtctgcgggtgggtgaatcagggagccgggagccccgcccaggccaccccctgggccctgccccagctggctccattgctgaggcctggcctgcttcctggccctgcccattcttaggaaacccatccaggaccccagccctgggaagcgtgcctggggcggggcagaccccagtgcttcctgcacagccccccgtcccgcaccagcaggaggagacccgagggaggaggggaggccccgccatggagctccccaagcccagcagctcagactcacccagggtgaccaccatgacggggatgctcaggcgctggcgggtggcctgcgacaggcgaaggaagccatactctagtgagtactccacgatgtactcgtcctgcggccacactgcagggcagaaccagggaccaggtcagcgcccccacacacgtcccccgcccactgccagcaggcaaggcaggcgttgaggggtggagggtgagacctgctgagccctgggccccaggtgggtgctgggaggacccctacatggacacttgggatggtgcccactcaagctggtgtcctgccctgtgcactgcagaggctggccaggctcctcctcccgtggccccctctccctggctggggctggctgggtgcagggctgccccactgccctggcggcccccagcacacccccaacacttcagaggccccggccctctggatagaccctctgctgccagatgggcaggggtgggggcgggggcgggggcttccctgagcacagcccgctagaactctgagctcagagccgaagggatccatcccctccaagtcgccgttcacgaggatcccagaaaggatgagctgagccagttaccccaggctctggggtgtccccacagcctcctgtgctgacagatggggaaatcgaggcacgggggtgccctcaacggtccaggacatgcagccagcaggctggggatgttcggagggaccccgcctgcaccccagcaccccatgactgaggcaaccccgtgaggcagtacacctttggtgggtggcctacctttggtgggcgtctcggggaaggggaactcctggctgtcattcagggcctctgtgctactcggcggcttgaacaccttgggctcgatgtccagctcaaactgtgggcgaccagggacctgggtgtcagcagcgccagcccgggctgtgagggcccagcctgaggatacagtcctgctaatgggaagggactggaagcctcagcctctgccccaccactgaccaggccagggtggactacgtgtgcctcccgcctcagctgggaccccacctcaacaccaagcctgccctgctgtgaggccatctccagcacagctctgaatcctgaagctgaggcaagggccagctacaggcagtagaccccatggaagggtccatgatgctctgcccaaacactcaaactcttggggttggctctgtgggaacaggtgggaccccaaaccctgactgctgaagcaaaaacatctcccaccaggctgtggggcccaacacagccacctggtcccaccagtgcccaaggccaccacaagctgaccgggaacccagcacctctgcaggcagtggggccacctcaggacggccaggatgggcccagagctcttagctttcagcccccaggcctcctcagctattgctgcccactgcatccccagccccagccaatcccctccccggaacagctactctcaaaggcccgagtctgcccagcccaagtcctccccgagatccccctgccctgcccaggcctctagcagggcgacaggccgagggtcttgcttcagagcccccaggccaccaaaaggccacggcaggcaggggcggccttgtctgcatgccaggtccctgaaagtcaagaaccccaacatcctgtcgatgtcaggaaccgccccttcagcgaccagcatctacggggcgctggcctctgctgcagctgagcccaggcctggctcaccttgatggagctgttcccaaacatctccatggtcagctcttcctcctcctcatcttccatgtccaggttgctgcctggttccacggccaggcccgggaagctcccgcggccgccgctgtcacagaactgtaggaagacgggcgcgcggctcgagttgtgccgcacttccacacgcaggatgccctcacgcggccacttgtcacgcacatgctccaggcagttgatgggcgagcgggagaagacgatgtggatgtaggccaggacgaagagcacaaacagggcctagggggcggccggcagtcagtggggcgccccagggccagctgcagccgacacccaagggcctacgtgatggggcgtgatggggcgcgctgggacgcccaggacggggaaaggaaggaaaccccagaagccgaattgggctctgaggaccctgggtccctcccacgctgactgcaccgggccagcccctcacatagtccaagtgactgaggatccgggggacgccccactccaaccccggaggggctctgccacctgcagcccggctctgacaggccctggggcttcggcaaggcctgtgactgccccgcacctcctcaggggtgagccggacgaagccagcaggccggggccctctcagatgcacacaggaccccccaaacctgggaggagacgaggctggactcagacccaccaagtggagcacaccagggccctctgccagccaacggctcccgccctgcaagcagcagcatgggtgttgccgccaccccagggccaccagctggacccactgtctacgaaagagggcacagccctccacagcccaacctgctgcttcctgcctcaccttccgctgcgtccccagcactcccctgatctcaccacctgaaaatagcttctctcacctggcggggcgccctgtgcaaccctcccaggcctggcggggccagccgcagctgctggggacacagtggacctccgtggctgggcagagcgccccacggcagggcgaggctgccgtgcccgaggcacaacctatgaactggggtgccagcagctctcacctgggggctcctgcccaggggatgcttgggacatctgtggttgtcacaattgggggagctcctggcatggagtgggtgaggccagggatgctgctcggcaccccgcagtgcccaggacggccccaccccgacgtccacagggcttggggagcccacgccccagcgtgctgcaggcacaactcagagtggggcccctctaggggcagttcagggcagcccctcttccagggagcccgcctcaccgtctggcggtttggctgcccactgtacctcccaacctgaggtccaggcatcacccccgagcctggtgagggtcacgtctacctgctgccccgatccgcaaaactgaggacccagctgggccaagggggcgcccacggccacatggaaccccagactctcagggaagaattgatcagactcaaaatcacaagccagagagcctggagcacagggcccctccgtgacccgtgacctgctggcaggtgcaccaatgcccggggtgcagtgagccacctgtggccgcacagccataggcaagaccaccaggagcctcaactcttccacgcccacagtgagctggggcctcctctccagaaccctctgtagactgagcaaagggccgagtcagcaaagcaacccacttccagcccggccgcagtgctgtgacctgtgggaggccctgagtctgagcacggataaagccctgggtctagccgcacgtgcacctggggcgagccccatcacactccccagccccaggagctggagaatcccttgggctgatctgaactgcatttctagtccttacagccaaaagagccgcaggggatgaaggctggcccggcgctgagatttaagcagaaacaggcaagagcagaaccctgaccgccaggcattcaggccccgcccacagacgccggagctacaaatgaggggtgggcggggggagggggcagggccctctgctggggagggttcccctgtgtcctggggaagacagggagggcagtgtggaaggggggcagccccggagcctgagatgctttcaaagcctagcgtttccccatatggcatctggggacaggagccacggaggctgggcccagtggtgggtcacggtcagagacactgaccccacagcccctcggctcagcactctcaggagagaggggcccgcgaggcccatggtggatgctgctggtggccacgctctgccttccaggcccacacatccagcaggagctgtgcccaggacagcaatggaccctgtgccaagatgttccaaaaagtgctgatacacagtgggccgaggtcggggctgtccaacgcttcacaagggacgcacggctgttaccatccctggtttatatacgaggaactgacacagaggtcccgacagacctggacctgctgaggtcacatggccaggagggaggggccagggcagtgccagtctgcacaattaaggccccacggggaagagcagctcctggggttgccctgggcagggtcagcttggtccagggtcagcgggagagggcacaggacacacatcctgccacacccagcactggtgtgagtgacccgtcccatgaagacagcggacgtgatgagagggcaccagtgttttcacacaatgtgcacacactccagtcaaagacttcaagtccaccagacgctatgactcagacgtcactgtgtctctgccccatcaggtgctccgtgctgaccgagctcagggcccctcttccctgactgagcatgaccagaaaaatgccccactggacaaggcccgttgccgccaaagcctcagctccccttcagtctcccaccacaaaacaaggagcaggcaccacccagccagacgcaggctcatcccgagtcccgggtcctcctccccaagacctgtctgtcatcagccaccctgcagcagccacctcaccaggcccggccctgagccacacgcccaggcagcctcgtccacgcccacagtaaccctccccagggagctcacctgcaaatgctcccatgggcccctggccaccctctgcccgcaacctggctcagccactcgcatgccctgggtggtccagtcccctacactccatgaccctgtccctgacccaggctccccagcaggcacccacatgctccagccccacggccttcccacacgctctccagctgcctggacaccccaccccatcccactggctgtggctcacctccaggaggccctgcccacccagcacaggagtcaccccacccctatgacccttccttcctccgggtcagcccacacacggctgcacccacaggagcacctcccccagcctggggccgtgctcaccgcctcctccaggaagcttcctggatgttctggccgaggctctcagggcaccccaacactcggccactgggtgggcctttcctttcctgtctccccacagacctggagtgccaggagcagcctgcccgctctctgggtatttgactgacccacagaccgacggacacacaagcccgcggagccacactctcctcccaggtgggacacagagccctcagccccagccaggaaacactacctggggctcccctttgtccacccggggtgcttcctgcctccaggccaccggggcctctccttccactgcagcctcacagtggcctcaatgtgacaggtcccccattcagagcagggcccctggggtctcacataccccgtctttaatcgtcacgaccccacaagaggagccccattactccctgtggctaggcgcgggcccctgcccatgtccaggggtgctgagtcgagaccccttcaccctgtgggcatccacttggtggtcacctgggtccagagcccaaccgcacaggtgcaggcacccagtgccccaagatggacagtctctgccacactgggctcagggccatgaaggccagcagaggtggatactgaggctggatggaggtctcccgagggcccctggaacacaggcccctgccgcctcctctctccccagcacctggcactgcctggcatttcctaaagccacccaggcatggatgagggaccggggggctccatgctggctcagagctgggagatcctggcatttcctaaagccacccaggcatgggtgagagctgggggactccatgccagctcagggctgggagctcagctgcacagatgccacaggatgaagccaccttgaagggatcataccagggaggacctggctctctgcagggagacccccggaagccaggcaggcaggaagcagaggagccttctggaactcaaggcagcctctgaaatcaggcagttccagcctgcactttgcagataagtaaaagtgaaggcagcagggtcagattctgtgccaccagattaccgggtggaaaattcacaaagaacagatttccccacccaggccaggcatggtggctcacgcctgtaatcccagccttttgggaggccgaggcgggcagatcacctgaaatcagcagtttgagaccagcctagccaacatggcaaaacccagtctctactaaaaagacaaaaaaattagccggttgtgatggtgggcaccggtaatcctagctactccgcaggctgaggcagaagaattgcttgaacccaggaggtggagtttgcagtgagccgagatcaaaccactgcactccagcctgggtgacagagcaagactccatctcaaaaaaaaaaaaaaaaaaattcaccacccagagatctcacagtccaaagccctctgctgagagaggagggattggggttactgagaacctcccaagagtctccaccctacacagaagacggggaactccagctctggcccagccccatctgaccacctgtgagtggtattggcctggagatggagccgggtaggcttgatccctttccaaaccgggacatggtgggaccagggcccaggcgacagggatgcacctcccaaggaggctgagctccgtcgggggaacctggcctggcacccagcacacaccctccacaagcctaaggacacagtggctccatcctgttcccaggctactccatggaaggaaaacccacgtccacagaccagcctccgtccacagtttcaggccccgtctgtggaccccagagccgggaaaggccgcctgcctgcgtaacccttcacagccctgctcaggtgcctactgaggcgaccatgccactctggggggctgcagggaggaaggtgggaaggatgatgggctgagctctggcctggggaggcacggatctggaggctggggggccttccgtgaagtggcagcaggctgggacccacacccaggtccgcaggacggccaaggtccagctccacttgccgagcccaaaaaagcagccagctcctgaccaacctgtgtcaggctgggaacttgcccacgatcgcagcctggcccgccagcatcggacccctctttgcaggctagatccaaaaagctcacggcgcaacttcagcagcccccaagccccggcgcggcggtgttctgatgcagaacgaaaacggccacgtccccatttcgccaggtggcccaggaccccggccagcttgttttctgaggggctgcagctgctactgagcccctcttgtcacccaagcaagactccttctcagagggagtcaggccgatgcctgtcctgcacggctgagacctctgccatctgaggagggcgggagggggacagagcccaagacgcggaggccggtgcctcataggggaggcacgggcgacagacccacaacctgagctcctgaagcaggaagggagtggggacccagcggaggaagaggccggggatggggtggtacgctgctgccggtgactttgccgctaaccctagcgaggtgacctcagctaagtcacattcccctgaggctcaggagcggggaacgcagctgaaaggctacaaggagggagagaggggagtggggagtcgacttccaggacaggggttggtccgagggagacctgcgtcaggctgggttctgggccagcacattgggaggggagagaggcctcggaactgagggtctcaggcggcacagtcaggggtcaaagggcgggaggtgctacctcgcaggccaggaccggactccaagcctgggtaggtggggacctgggaaaggcggtcgccggggacaggatgggccctggagggagctgacagtgaggtttccagagtagagaacagcggcttctagtgcagcgggatccggccttcccgggtggacgtccccgggcgggatggggtcacgagacggtgtccctggccaatcccagggtcagaggtcgcgagggagagccctaatcggtagggccgggtataggcctcagggtgcagggtggcgctcgctgtccccagcggggccaggggtcgcggtcggaggtagcagacttgggggtcgggacagccgctggggtcaagggtcgggggtcggggccgcggtcaccttgagcagcacgaagaactcgaagagacggcggaaggcgggcgggaagagccgcgaataggtgacagccatcttgaagaacagcgcgtggaagagccggtcgcgcacgttgatgagggggttggggttgagattgggggtgcgaggcccgcgcgcgggggccgggccgccgccgccgccgttgggcccgggccccggagctgcgggctccacgtgctccgacatgcctcccagcgtcgcgccctaacgacccgcaagtgtccgagggcgcctcccggccgccatcggccgccctcgcagccgccgctctcctcacggcctcccggccgccgccgccatcttccgctttctcgtccggctgcggcgctgctgacgctagcgagtcgccacgccgggcaagagcggcccccctgcgcccgcagagaacgctgggatgccagcggcgcccgcggaggcctcaccccctacctcggccgctccagggggcgggcctgcatctgggccacctcttttgcatattggcacccacaatccaccgcggctatgaggccagtataaggcggtaaaattacgataagatatgggattttacgtgatcgaagacatcaaagtaagcgtaagcacgaaagttgttctgcaacataccactgtaggaaattatgctaaatatgaaaccgaccataagttatcctaaccaaaagatgatttgattgaagggcttaaaataggtgtgacagtaacccttgagtcgtgctcgcttcggcagcacatatactaaaattggaacgatacagagaagattagcatggcccctgcgcaaggatgacacgcaaattcgtgaagcgttccatatttttgctgtagtctacagctcgtcacctcgtttggcttctcttgcccggatcctgccatgacgtcacagggccagtaacgtcatagtcttcccgtgtccatctcctgtggcgccactaaggttggcggtagaacaatctggcagtctctactcctgcgtggcgctgtgccacctgcccccgtagcttcgcgcagcaatgaataaataagtgctcttcaggggcacttactgagtgccggctgcgtacacaagaggatactatggtttttgggttttttggttgtttgtttgagatggattctcgctctgtcgcccaggctggagcgcagaagcgcgatctcggctctctgcaacccccgcctcccgggttcaagccattctcctgcctcagcctcccaagtagctgggattacaggcatgcgccaccactccaggctaattttatatttttagtagagacggtttctccatgttggtcaggctggtctcgaactcctaactttaggtgatttgcccgcctaggcctcccaaagtgctgggattacaggtgtgacccaccaagcccgccaaaaaaaagttttgtgttgttttttttttttgagacgcagtctcactctgtcgcccaggctggagtgcagtggcgtgatctcggctcactgcaacctccgcctcttgggttcaagcaattctctgcctcagcctcctgaatagctgggattgcaggcttccgccaccacacccggctattttttttgtatttttagtggagaccaggtttgatcatcttggccaggttggtattgaactcctgacctcgtgatccacccgcgtcagcctcccaaagtgctggagttacaggcatgagccaccgcgcccggcccccccaaaaaaatgtttttaaaagttaactgaggacgttggtgcatgcctgtaattccagctacttgggaggctgaggtgggaggactgcttgagcccaggagttggaggctgcagtgagccatgatcgtatccctgcgctccaggttggatgactaagtgagaccctgtctctaaaaaataaagtgtaaaaaagccaacagtcagtatttttagcttttttgggtagagtaactactccactctgctgttgtacagaaaacgcagccgtaaatgatacataaatggatgggcacagctgtgtgccaataaagctttgtctgcagacactggaatttgaatgttatgtaatttccacgtttgatagaatggttttcatattttgggtttttttttcaaccacttaaaaatgtaagagccattcttagctcacaagccatacaaaaataggctgcagctggatttggcccacaggtcaagaacacagctttccaagagaaagataagcaaataacaaacataactttaagtgttctggtagccacagtaaaacaactaaaaaagagcaagtgaaattaattttaataatatattttacacatctcaagttatccaaacaaggtcaggcgcggtggctcatgcctgtaatctcagcacttttggaggctgaggcgggaggatcatttcagcccaggtgttcaagaccagcctgggcaatataatgagatcctgtctctacgaaaaataccaaaaattagctgggcacggtggtgtgtgcctgtggtcccagctacttgggaggctgaggcaagaggattgcttaagccaaggagttggaggctgcagtgagctgtgatggcaccattgcactccagcctgggcaacagagcaagaccccacctcataaacgaaaaaaaagtggccgggcgcggtggctgacacctgtaatcccagcacttgggaggccgaggcgggcggatcacgaggtcaggagatcgagaccaccctggcaaacacggtgaaaccctgtctctactaaaaatacaaaaatattagctgggtgtggtggcgggcgcctgtagtcccagctgctcgggaggctgaggcagaagaatggcctgaacccgggaggcggagcttgcagtgagccgagatcacgccactgcaccccagcctgggtgacagagcgagactacttctcaaaaaaaaaaaaaaaaaaaaagtaactgagatgtaccaagtcttcagaatctggtgtgtttcccatccatggggtgttccaatatggataccagtgcttcctcagaaatacttatctccacagtatttagatttacagcgtttatactgaaaaggaaaattcagaaacgctaaggtatttaaaatatacacgaggctgagcacggtggctcacgcctgcaatcccagcactttgggaggctgaggcgggaggatcacttgaatccagactgggcaacatagggagaccccatctctacaaaaaatttaaaaattagctaggcatatggcacatgcctgtagtcccagatactcaggaggctgaggcaggagattacttgagtccaggaggtcgaggctgcagtgaactatatttgcaccactgcactccagcctgggtgacagagcaagaccctgtttcaaatatctatatatttacatttatatgtataatgtgtacatatgtgtgtatttatgtatttgaaaactttaatgtgtgtgtacatatatatatagtcaaaaacggaaatcatgtcagtttttaatttttaactgaaattaattgaaatagcccggccacggcagctgacacctataatcccagcacttcggaaggctgaggccggcggatcacttgaggtcaggagttcaagaccagcctggccaacatggtgaaacccgcatctctactaaaaatgcaaaaattagccaggcgtggtggtgcgtgtctacggtcccagctactcggagtcccagctacatatatatgtgtatttatatatatgtgtcttcaaaaaatggaatctagtgccagtttttaatttttaattgaaatttaagaataggaagtatttgctgggt[173 bp omitted]ggcaggagaatggcgtgaacccaggaggtggagcttgcagtgagccaagattgcgccactgcactccagcctgggtgacagagcgagactccgtctcaaaaaataataataaaataaaataaaaagaacatgaagtatttgcttccctgatggcaccagccacacttccagtgctcagtagccccatggccagtggctacagtagtagatagtgccacattgaaaatttccttcatctcagaataacagaaatggtcagcactggtctaaaatgacatgggtcggccaggtgcagtggttcaagcctgtaatcacagtactttgggaggctgaggcgggtggatcacctgaggtcaggggttcgagaccagcctggccaacatggtgaaaccccatctctactaaaaataaaataaaataaaataaaataaaataaaataaaataaaataaaataaaatgtgtcaaactcctattgatgcttcaaaaccccatctcccttgcctcctcttacatgcagctttccttgattcctccgacagagccccaactctccctccagttcctccagccccaagcctctcattctgtcctgtacttgctcatatagggaaacagggtgggcggggtgggggggttccgcctgtgctggctcatacagggaatccgggttgggggttggtctgtgccagctctgtcttcctgggcatgggctgggccagagctaaggtctcctgagagccagcactgcctggcaggagactgtcccggagactttttaataatttattattatta[137 bp omitted]gcctcctcagtagctggaattacaggcatgtgcccccatgcccggctaatttttgtatttttagtagagacggagtttcgccatgttagccaagctggtctggaactcctgacctcaagtgatccgcccgcctcggccttccaaagtgctgggattgcaggcgtgagccactcggatttttatttttatttatttatttatttttagagagaggctcttgctctgctgcccaggctggagcgtcatgttgtgatgataactcactgcagcttcgacctcttgggctcaacggatcctcccccttcggcctcagcctcccaagtagctagaactccaggtgcaagctaccgcacccagtaagaatcctattctcttttggactgacaaactcctactcatccaacaaagccccagctccaatggccccttctctgaggaacctgccctggttccctggtccacctcccagctagtagagttccctgggaaggggttagacgcctctaagtggcagagaggggccctcattcctgccccaaaggtagccttctcccctcccctttctggcagaagagaagtctgagatggagaaagagtgagagccgcccacgagctctgagcagagagcccgcaggagtgccacgtcccggcggcctcggcccctccctgcctcagtttcccgtggcatcaaagggggcgaggggcccctccaggcctctggtgacgggggtgctgtgcccaggcgggggtccgggggcgaccgagggggctcaggaagtccgcggccgcaggaattcggcgcctccaggccttataaggacatttgcgctccgggccaatcagcggcgggggcgtggcgcgcggagcccggcgcgtcccaaccccgcgccagcccggcggtcccgtcccgtcccgtcctgtgcggccccgtcccgccgcccgcccgccagccatgagctccacgcagttcaacaagggcccctcgtacgggctgtcggccgaggtcaagaaccgggtgagtgaggggcgccccttgtccccccgacagcgcggccgtcgcacgctccgaccggtgcaggagcccccaggcgcccccggcacctcccgggcagggagcttggagacccggggcggacgggcccttgttctccctgacgcctggtggggggatgtctgcgggcaccccctgaggctcccgcgaatcttggggagcacccaggtctgagatctgggggacgagtgacccattcccccccccaacatctaggggtagttgggtctgacttcgtcccctcgccatggccccaggacccccacgtgtgaagcccctggcgcccactcaaccttcgagaaggtccgttcaaggtccgacaacgctctgggggtctgggggggaccccagcaaccccgtcatctcctggccacacttctgcttttggggcctcttagctttgggaggggaaggggcatggccgagtggtttttgagaagtgttacccccccacaaacaggaatttcctggcctctgggacaccttgggggtgtcttggggggaggggcggtagccgctttgcacggtctttgtctcccatctgactaatttaaacggataacaaagaggttctctgaaggtggccctgagatatgtggggttttgcagcctcgaaagaagagctggggcccggcagggcgcgggggctcacgcccgtaatcccagcactttggggggcggagctgggtggatggcttgagcccagcgagttcgagaccagtctgggcaacatggcgaaaccccatctctataattaaaaacaagccagggctaggggagacactttttaagagagcacttgtggttctagctcagagaggaccagacacttctgcagggtcacacagcagggtcctggacaggattcccagggaaagtggggggcgggggttgtgatgcgagacccacggacaggaccgggacctgaccctccaggaccttccagctggaggggggtgtcgtccccgcccaccccctcccccgacgcccactgggcacctgggaaggtgtccttacagctgacttctgcaggggaaactgcctctgcacgctctgagggcaccggccctgccagccccaacagccacctgcccggcggcactccagggccggcagactggagggagaattcctgcttccccgctgtgagcccctgcaagccttcagaccagctcttggccaaaaagggaggctgaggcttggggtggtcaaggcctgagccagggtccccagcccggggctcacgactcctccttcaaggggccatctgcaccctgcattcatagagccccccgtgcagtggggtgggcaccctgccgcaccctgcatacagccggctaagggcaccggtgtccacagggacccagagacgtcgttccagctgcccagggccacacagcccacaagtgacagggccaagaccggaacccagtacctgctgggcctgcggaagtgggagcgggcacaggagggtggggcggcttccggagacggggtggggtggggtgggggcaggttgatacctgccctggcgggggtgaggacagaggctggaagagccgcttagcaggctccccgcgcaaccctcagtctgtccgtttggagggtgggcgaggcgtcggccagcttgccagggtcacggaagggtcgcctcccaattagaaaccagcttccccctggcttcccgctcacacccgctttaccggctgcttgaaacagccagagacccgccccccgccccgcttccccgtggctcagttgactcccggctggacggcacggaggcagctcggatccacagtgtctgcggccttgcatcccggcttgggggtccggacccgctgggaacagctggttcagatttagccggggaggcagcgcgcattcctggcagtttgtggtgaacaggaatgtgctggaaggccggcggccgggcagcgggggggcgggggtgggggaggacggcagcggctgggggtggggccaggggacctgggcccctgagccggcagagacgcggcgcagctgggcaaggcagggctgtgtacccagcagccaccgttctcattcctcgggatcaaagttgccggcggggcggggctgcccccgggcgtggaaagccaagctgggtgggctgtgagctggtactggggggcctccccgcctttgcctcctctgggctacgagctgtttccaggcaggtgccaggtcaggggaccctaacccaaataatcccaggcaggtccaggtcaggggaccctatcccaaataatcccaggcaggtccagctcaggggaccctaacccaaatcatcccaggcaggtccagctcaggggaccctaacccaaatcatcccaggcaggtccagctcaggggaccctaacccaaatcatcccaggcaggtccagctcaggggaccctacccaaatcattccaggcagatctagctcaggggaccctaacccaaatcatcccaggcaggtccagctcaggggaccctaacccaaatcatcccaggcaggtccagctcaggggaccctaacccaaatcatcccaggcaggtccaggtcaggggaccctacccaaatcatcccaggcaggtctagctcaggggaccctaacccaaatcatcccaggcaggtccagctcaggggaccctaacccaaatcatcccaggcaggtccagctcaggggaccctaacccaaatcatcctaggcaggtccagctcaggggaccctaacccaaatcatcccaggcaggtccagctcaggggaccctaacccaaatcatcccaggcaggtccaggtcaggggaccctaacccaaataatcccaggaagagatgaggaagcggaggctgagtggggagctgtccgcgggaacctggggagatgggtgcagagcagggagagggatttgattttttttttccttctctcttttctttctttttttttttaagacagaggctcactctgttccaggctggagtgaagtggcccgatcttggctcactgcctcctctgcctcctgggttcaagcgattctcctgcctcagcctcccaagtagctgggactacaggtgcccaccaccacgcccagctcatttttgtattttagtacagacgggatttcaccatgtgggctaggccagtctcgaactcctgacctcagatgatccgcccgccttggcctcccaaagtgctgggattgtaggtgtgagccaccgcacccagcccaaaccctactttattctccctccagcgtttatctcccgctcccgctacacgacctgcccccatgcttatggccccctatacactttgccgtctgcctcagtgctgtctccgcggtcactagtggctggatagggacactcgaggtccccactggtgcacacccactgcccaggagcacacagcccattccccacggcggtgtctcagagcaccgaaggccaagaaagctggaatggccgggtgcagaaaggtggcagggaatcggtggcaaggagccaggtgcgtgactagaggcggtcagcctcgggggcagctccttcgggagttgctaagaagcaggatgggggccgggcgcggtggctcacacctgtaatcccagcactttggagggctgagacgggcagatcacgaggtcaggagatggagaccatcttggctaacacggtgaaaccccgtctctattaaaaatacaaaaaatgagctgggcctggtggcgggcgcctgcagtcccagctactcgggaggctgaggcaggagaatggcctgaaccggggaggcggagcttgcagtgagccgagatcgcaccactgcactccagcctgggcgacagagtgagactctgtctcaaaaaaaataaaaaagaaaaaagagctgatggttgcacaacattgcagacgtacgaaatgctgtgaaatggtgcggtttcaggtggttgaagtggtaaacgtcaggtgtgatatagcggggaggtgagaaggcagggcggggaggcagatccggccaggtttgtcctgcaccgggagtggattagagctgatgtttatcagtgagttctaagccggttgtcggcctgcttggagggcggtttatctgtgcccgcctgcagtggctggggcgcccccaatgatgggaaaagggagcatctgcgtgggtgtggtgaggggggacctccaggccgctctatctgctgttgccctggagtccccggccccaccctctgcagagcttctgtggggttcctgctgggggtgcccccagcccagctcagtctcgtgccctttgctccaccagctcctgtccaaatatgacccccagaaggaggcagagctccgcacctggatcgagggactcaccggcctctccatcggccccgacttccagaagggcctgaaggatggaactatcttatgcacgtgagtacacgcagggacacaggctgtctcacacttaacaaatcttggtttttctcactttttttcttaattaagaaatttttggggggccgggcatggcctggctcatgcctgtaatcccagcacttttggaggccgagggtggtggcggggggcggtggatctcgaggtcaggagttcgagaccagcctggccaacatggtgaaaccccgtctgtactaataatacaaaaaaattagccaggcacctgtaatcccagctactcaggaggctgaggaaggagaattgcttgaacccgggaggcggaggttgcagtgagccgagatcacaccattgcactccagccggggtgacacagcgagactccatctcaaaaaaaaaaaaaaaaaaaaaaaaaagttagctgggcgtggtggctaaataaataattttttttttttgaggtggagtctcactctgttgcccaagctggagtgcagtggcatgatctcggctcactgcaacctccacctcctgggttcaagtgattcccctgcctcagcctcccgagtagctgggattacaggcgactgccaccatgcccggctaattttttttgtatatttagtagagatggggttgctccatgttggccaggctggtcttgagcccttgacgtcacgtgatctgcctgcctcggccttccaaagtgctgggcttacaggcctgagccaccaaacccagccaaagattactttataagagtggaaacttgaggcctgggatggtggctcacgcttgtaatcccagcactttgggaggttgaggtggacggatcacgaggtcaggagatcgagaccagcctggacaacatggtgaaactccatctctactaaaaatgcaaaaattagccgggtgtggtggcaggcacctgtaatcccagctactcgggaggctcagggctgaggcaggagaatcacttgaacccgggaggtggaggtggcagtgagtctagatagtgccattgcactctagtctgggtgacagagctagacgccgtctcaaaaaaaaaaaaaaaaagagtggaaactgaggcccagagagaggccgtgagtttgcccaggaaggcgtgagcttggctgagatcagcatcgggtcttcacggttcctcgctgctcacagaggtttctgtttcccccgccccatgttgtgccctccagactcatgaacaagctacagccgggctccgtccccaagatcaaccgctccatgcagaactggcaccaggtgaggggctggtggagcggagcagggatggtgctgggggcccatctaacaggtggggagactgaggcccactcactgtccctctcctgcctcttcccagctagaaaacctgtccaacttcatcaaggccatggtcagctacggcatgaaccctgtggacctgttcgaggccaacgacctgtttgagagtgggaacatgacgcaggtgcaggtgtctcttctcgccctggcggggaaggtgaggcccagagaggggcagccacctgcccagagtcacacagcgaggtggatgtagctgctgcattcactcgtttgcaaatttctgtttgtttatttttgagtcggagtctcactctgtcactcaggctggagtgcaatggcgtgatctcagctcactgcaacctccaactcccaggttcaagcgattcttctgcctcagtctcccgagtagctgggattacaggcacctgccaccacgcctggctaatttttgtatttttagtggagactgggtttcaccatgctggccaggctggtcttgaactcttgacttcaggtgatccgcccgcctcggcctccccaagtgctgggattacaggcatgagcccctgtgcccggcctcgtttacaaatatttctgagcatccgtgaggtgccaggtacttcagattccttggtgaacaggaaggacatggtctaccccttatgcagttcagtctgatggcggaggcatgcaaaagtgaacacag[131 bp omitted]tgaaaccccatctctactaagaaaacaaaaattacctgggcgtggtggtgcatgcctgtaatcccagctactcgggaggctgagcccaggagttaagaggttgcagtgagctatgaccacaccactgctctccagcctgggcaacagagcaagactctctcaaaaaataatcataacaaaagtaataaataagctctgaactgggagaaatgccttgaaggagaagaatcagacgaatgttgagtgtctagtgatcttcaaacccagaccgggagcgtgggtgggacagtggtgtagaccgggagcgtgggtgggacagtgtctggtgtagaccgggagcgtgggtgggacacggtgtctggtgtagaccgggagcgtgggtgggacacggtgtctggtgtagacggggagcgtgggtgggacggtgtctggtgtagaccgggagcgtgggtgggacacggtgtctggtgtagacggggagcgtgggtgggacggtgtctggtgtagaccggcagcgtgggtgggacacggtgtctggtgtagaccgggagcgtgggtgggacggtgtctggtgtagaccgggagcgtgggtgggacacggtgtctggtgtagacggggagcgtgggtgggacggtgtctggtgtagaccggcagcgtgggtgggacacggtgtctggtgtagacggggagcgtgggtgggacggtgtctggtgtagaccgggagcgtgggtgggacacggtgtctggtgtagaccgggagcgtgggtgggacggtgtctggtgtagaccgggagcgtgggtgggacacattgtctggtgtagaccgggagcgtgggtgggacggtgtctggtgtagaccgggagcgtgggtgggacacggtgtctggtgtagacggtaagcgtgggtgggacacggtgtctggtgtagaccgggagcgtgggtgggacggtgtctggtgtagaccgggagcgtgggtgggacacggtgtctggtgtagaccgggagcgtgggtgggacacggtgtctggtgtagaccgggagcgtgggtgggacggtgtctggtgtagaccgggagcgtgggtgggacacggtgtctggtgtagacggggagcgtgggtgggacggtgtctggtgtagaccggcagcgtgggtgggacacggtgtctggtgtagaccgggagcgtgggtgggacggtgtctggtgtagaccggcagcgtgggtgggacacggtgtctggtgtagacggggagcgtgggtgggacggtgtctggtgtagaccggcagcgtgggtgggacacggtgtctggtgtagacggggagcgtgggtgggacggtgtctggtgtagaccgggagcgtgggtgggacacggtgtctggtgtagaccgggagcgtgggtgggacggtgtctggtgtagaccgggagcgtgggtgggacacattgtctggtgtagaccgggagcgtgggtgggacggtgtctggtgtagaccgggagcatgggtgggacacggtgtctggtgtagacggtaagcgtgggtgggacacggtgtctggtgtagaccgggagcgtgggtgggacggtgtctggtgtagaccgggagcgtgggtgggacacggtgtctggtgtagaccgggagcgtgggtgggacggtgtctggtgtagaccgggagcgtgggtgggacacggtgtctggtgtagaccgggagcgtgggtgggacggtgtctggtgtataccgggagcgtgggtgggacacggtgtctggtgtagacggggagcgtgggtgggacacggtgtctggtgtagacggggagcgtgggtgggacggtgtctggtgtagacggggagcgtgggtgggacacggtgtctggtgtagaccgggagcgtgggtgggacacggtgtctggtgtagaatggaatgggagtgtgtgtttgtgacatggtgtctcacgtagaaggaacagcaaggtcttgacattggaattggctgggctgttagaggaagcgggagctggttttctcctggggtaactgctccaaatggtgttttcagatgccccctgtggctcccagtaacctcacgtggggaatggtggtcagggaggagccgggcgcagacatcccagtgaggggcagagccaatggcctggccatggtgcccggggattgggtcagaggaggtggtggaaggtgagagagaggaagcgaaaaccacgtccccatccccagaattcttggcctgagccctggaaagctgagc[224 bp omitted]gaggcaggagaattgcttgaacctgggaggagggggttgcagtgagcggagatcacaccactgcactccagcctgggtgacagagccagactccatctcaaaaataaaaataaaaaactgaaacagctgtatgatgggtgtgtggagtgtgtggagtcccagacacccgagagatgtgcctgtgggggctctgcgcggcaggcagaggtgacaggccgcggcctggtctctgtcccgcccccagggcctagatctagggtccctggctgccctctgctggtactcccggcccctttccctcacccaggccaagactaaggggctgcagagcggggtggacattggcgtcaagtactcggagaagcaggagcggaatttcgacgatgccaccatgaaggctggccagtgcgtcatcgggctgcaggtgggcgacagctcccccagccccagggaccacggcattgggggaccacggtgttgggggacagcagcattgggggacagcggcatggagccctgtggtccctcaatttcagggagggaccggaagcttgttgggtgcagtctgacctctcccacgaacctccctgcagatgggcaccaacaaatgcgccagccagtcgggcatgactgcctacggcacgagaaggcatctctatgaccccaagaaccatatcctgccccccatggaccactcgaccatcagcctccagatgggcacgaacaagtgtgccagccaggtggggctcgcccgggtgcccccgactcctctccctgcccctctacaccctgtggtctcggcccctccctggggccacctccagcttctctccccactctcagtctcagccccttccctagaccacctccggcttccctccccgctctctgtctccgccttggatttcagcctctgtcatttccacctggctgtgggtctctagggaagttactacctcaccctgtgtcattttcccttaaggactgcccaaaggtccacccaattctttttttttaatctttatttattttatttatgtatttattttgagataggatctcactctgttgtccaggctggagtgcagtggcacgatctcggctcactgcaacctctgcctcccgggttcaagagattctccttcctgcctcagcctcccgagtagctgggactacaggtgcatgctgccacacccggccaatttttgtatttttagtagacatggggtttcaccatgttgcccaggctggtctcgaactcctgagctcaggcaatccacccgccttgacctcccaa[132 bp omitted]ctcagcctcccgagtagctgagactacaggcgcccgccaccacgcccggctaatttttgtatttttagtagatatggggtttcaccgtgttggccaggctggtcttgaacttctgacctcaggtgatcctcccacctcagcctcccgagtagctgggattacaggcatgtgccaccacgcccagctaattttgtatttttgggagagacagggtttcaccgt[136 bp omitted]ctccttcctctccaggtgggcatgacggctcccgggacccggcggcacatctatgataccaagctgggaaccgacaagtgtgacaactcctccatgtccctgcagatgggctacacgcagggcgccaaccagagcggccaggtcttcggcctgggccggcagatatatgaccccaagtactgcccgcaaggcacagtggccgatggggctccctcgggcaccggcgactgcccggacccgggggaggtccctgaatatcccccttactaccaggaggaggccggctactgaggctcccagcacgctctctccccacatcgtctgcccatctgggtttttgggtttttctgtgttttcatcttttttttttttttcttaacccgttcagtgctgccagtcaaccaagggtctgtgagtgtcagcgtgggatcaggcagcagagcttttttcccctttgccttgatccttcgcaaggctgagccactgggctgtgggggaaggggtcaaggccatatcccaatacgtgtagggcgagggtccctgctggcacattcaggctgtgctgggaagaagagacctgggcttggaaggaaccggtccccgacggtttctgcttgcctcgcctcttcccccttttgtcagctgagcagtttgtggtttctatgcccgcaagtttcaggaagtattcacaaaagaaaaatacattttttcccccaggggtggggcaaggacagtggagagagtgctaggaaatgagtcccctgggaaaggggaccgggccgtgatgttaaatatctccggctcccaagtgactggatttgcctaggaccttcagaccaacagacttcagaccctcagacctgccccggggccaggtggagaaagtgagggccgtacaaggaagtgaaattctgagttgttggggctaagcctgaccccctctccatgctccccgccccaacccactctggcctcagtagatttttttttcagttgtggttgttgcccaggctggagtgcagtggcgccatcttggctcactgcacctccaccttccgggctcaagcgattctccagcctcagcctcctgagtagctaggactgcaggtgctccaccacgcccggctaatttttgtatttttagtagagatggggtttccccatgttggccaggctggtctcgaactcctggcctcaggtgtgatccgcccgcctccgcctccccaagcgctgagattacaggtgtgagccaccgtgcccagcccctcagtaggttttaaggagcccccagccctcctcccttctgggcccgaccagcttatactgctccatcttccccggccacatgccccgccaagtactgcacagggaccccccacccaggggacctgctccgtgagataatgtgaaatacgactgtggaccaaacgcaataaaacctctgtttgtacgaagagaaggtggccaagagagttggcgtcgatgagggcgtgctttgctttgatgcttttgtggggagagaggaggtcttgggggatggggggatcaaggggaaaatgtccacctcaccattgggaggaggagcaaaagctgaagccacaggtgagtctgggtggaatgaatgatttgaagggccgggacttggggtagagggagaggctgggcttcctggccatttggagaagaggcagttccctcaaatgccccccatgcgctttggctgcactctaccttacagcgcaagtctcgtggcctcagcctggatgtctccccgttggcgaactcctatttatcctcaaagccccaacggcaatgccacctcctgccgcgggagccgtccccacgcctctcactctccccagcgccttcaaagctgtggacccacacgctcccatttcagcttcacctccagcctgaagagtttatttcaactcttcttccagagtgggaaacgggttttcctcaaaatcagggtagccactataatcggagactctagaatgttggccccctccccctcctgccatcctctgcagaagccgaggagcgttcgtggaatgaatgaatgaacgaatgatctagtggaacccctactttacagacggacgagtgtagtcccagagtctggactaaactagagggagcctggccagccccggggacagcggggacagagggaactcctgcaattcggagctgcggtattgcagccggttatacaacgtggggaggcagcctggctccccaaagacagcgcagcctcgttcccggagggcggcctgcctgggacctgccgggcactccgccaccctacggtgatgcagcaagagccgcgcggtccctttaagaaacccggctaggcgaggcccttctgtgatcccgtctcctcccttggcccgcgcagctccgacggagcaggccagtgagtgacgggcaggtcgcccaatagcagcgtgcagaggcaggggcgtgccccggcgctgctacctgcgcgggcaagctcagcgcacttggcttaaggggcggcgcgctccctgcctgctgctgggcggagggaaggcggcaagagctgcggagcccctggaaggtgagaaggactcggagagggaagaaggcccgagactcgagaatgcggggttggggccgggagggatgcaagttccctgggaattagggggtccagcctctgacctccttccggtgaatgttgacgacggctgaattgatcactgattctcaaggggggcatcggacatctgggacccttaagagggcctttgccgatcacacacctgcagccccctgcccgttagaactcctgcactcccccttgccccgtcttacaaatggagaaactgagcccactcccccagatcctaagtcccgcttgatgtaaaggaaagaaccctggcgtaagggtctgggtctgaggtcccagttccggcctggtcacctttagcaacttcctgcccctctgtcagcgtcagattctccatctgtgtcagaggtggaccggcccaaggaaaatagatcaggaatcgctgactccaggagtctctatcccagccccttcgcctgactctttctctggctcccgcggtccctctgagcgattaatgctacataaggtgtgggcagagctggggtcgtgcctccagctgggcaactgcctgtctctctgggtgcctgggtttgctttcttgggcctcggtttccacttctgtagagtggggtgatagtccagcacttcccctgggcgtgtgaaatgtccagcactgccaatattcgttgctgttatcttcggagaacagtgaggggaaaggaatccttgcctgggctgggccaggcaggaggctgggggtcaggacctggaagaggcttccaggtgaggcttggggtggagcctggtgacgaaagcgttaagcccaaactcggtccctggaggattagaggatgatctttaagtccccagctgtcagccctgctcagagcgacagtcctggcagccaatcagatgcgaggacggctgcgggttgcgctcccattggtttactccacccctggggtagcggagcctctttatcgagtgactactgtttgcctcgctctaatcagagcttccaggaaccctgcgctgtgggataaaggaatgaggttcagaaaggggcagggagttgcccgcagccgcaccgcacgtcttcagcccgaccgttgtcctgacctctctgtcccgtcccctgcccagtctcaccatggccttctggacacagctgatgctgctgctctggaagaatttcatgtatcgccggagacagccggtaacgccccagtgtgagaccagggccgggtgggcaggcagcccccactgtcccccaccgtctcccacctattctcccccaggtccagctcctggtcgaattgctgtggcctctcttcctcttcttcatcctggtggctgttcgccactcccacccgcccctggagcaccatgaatgtgagcccccccagggaccaggcactttgtgtgtgtaggggaaggcagatggctcacccgtgcacaggaatcccccgtgcatgtcagggagccttcaccaggccgccaatacatggcatgggagtgagctctccatcgctggaggcatgcaagcggtgccgggcgacccgatgggggtggagtcaggcagagtccacagggcctcagcaccaggcgtctccccgcaggccacttcccaaacaagccactgccatcggcgggcaccgtgccctggctccagggtctcatctgtaatgtgaacaacacctgctttccgcagctgacaccgggcgaggagcccgggcgcctgagcaacttcaacgactccctgtgagccagaggcagtgggtgcggccggcctgcaaactcggggctgcagtgccggccggaaccccgcctcctgccctctctctgtccccagggtctcccggctgctagccgatgcccgcactgtgctgggaggggccagtgcccacaggacgctggctggcctagggaagctgatcgccacgctgagggctgcacgcagcacgggtgaggaggccggggggcctctggcagggctgagctctgagcctcaacttgccgggccgtgaaatgggcacagggtgggggtgggtgcctcagaccaacgtccccccagccccatgctcccgtgcgctcctcccccagcccagcctcaaccaaccaagcagtctccactggaaccacccatgctggatgtcgcggagctgctgacgtcactgctgcgcacggtagggtgtcggggcgggaccgcgctgacttcctgggacactgcactggggatgtcctggcactgccccaccccgggccaaggacctcccgttccaggcatccaggctgtccctggtctctgcggtgatgctgcttgtccgtctgggcccccagacagagtgtgtctgacccagtgaggaagactcgtctgtgagatctccaatgagtccctttgcctctcagagcctcagtttccctatttgtaaagtgggggctatgatagtatggtctgcctgggaactggccagagcgctggacccctagtgagtgttcaaaatcattgtcccccttgtggtctttctccccaggaatccctggggttggcactgggccaagcccaggagcccttgcacagcttgttggaggccgctgaggacctggcccaggaggtacgaggccccactcatcctcaacccccatggaggcaacgttggcaggcagcctgcgccgggagggtctggggcagcccgggcacttcccttgggtgggttttcaggaggattagacagcgagagggagaggctgcccctggcccagtgccctgccctggttagggcttggaggtgggatcattgccagctccgtctggtaacctctctctagctcctggcgctgcgcagcctggtggagcttcgggcactgctgcagagaccccgagggaccagcggccccctggagttgctgtcagaggccctctgcagtgtcaggggacctagcagcacagtgggcccctccctcaactggtacgaggctagtgacctgatggagctggtggggcaggagccagaatccgccctgccagacagcagcctgagtgagtgactgacctcggtttcccctcttgggaagtggaactctgggcaggggggcagggcctcatggcacccccatcccaggccccgcctgctcggagctgattggagccctggacagccacccgctgtcccgcctgctctggagacgcctgaagcctctgatcctcgggaagctactctttgcaccagatacaccttttacccggaagctcatggcccaggtgggggcagcctggatgctggggtgggagggtggtggccagagcccatccagtaccctcagtccaggtgggccagggccaggccggagggtcacggaaactatttgaagaagtaggagttagccgatggagggggatcagcttgtgcggaggatcagaggcacacgcaggagcaaggcagagggggcagggggtgggcaggggtcctcagaggaggagagggtcatcagtggagggggtgctgtccacaggtgaaccggaccttcgaggagctcaccctgctgagggatgtccgggaggtgtgggagatgctgggaccccggatcttcaccttcatgaacgacagttccaatgtggccatgctgcaggtgtgcgggggtgctggggaggtgggatgtggctccccggtgaggagggtagacaggcccggtggatgggaaggtgggctccgtgcagacccccacttttttttttttttttttgagatggagtctcgctctgtcgcccaagctggaatgcagtggcgtgatctcgactcactgcaacctccacctcccgggttcaagcgattctcctgtctcaccctctgagtagctgggactacaggcgcccaccaccacg[179 bp omitted]gtctcactctgttgcccaggctggactgcagtggcgagatcttggctcactgcaacctccgcctcctggattcaagcaattctcctgcttcagcctcacaagtaactgggattacaggcatgcgccaccactcccggctactttttgtatttttagtagagatgggctttcaccatgttggccaggctggtctcgaactcctgacctcaggtgatccacccgcctcgcctcccaaagtgctgggattacaggcatgagccactgtgcccgacccagactctcactttcacctgcgccccccagcggctcctgcagatgcaggatgaaggaagaaggcagcccagacctggaggccgggaccacatggaggccctgcgatcctttctggaccctgggagcggtggctacagctggcaggacgcacacgctgatgtggggcacctggtgggcacgctgggccgagtgacggaggtgagggcctgtccacctgcggggtctgtttcagtggggagggcaggtcccatcctagtgttcccaccctggtgttcccagggggaggcgggcccggccctagtaagagcctgggatttgtagagatctcaggagggagccggccgtgggcctacgaggggaaaacatggcccagccccgaggtccagggggaggagcggagtggtctaggaggcaggcggaccccagcgcctaggactcacccccgcatcccacagtgcctgtccttggacaagctggaggcggcaccctcagaggcagccctggtgtcgcgggccctgcaactgctcgcggaacatcgattctgggccggcgtcgtcttcttgggacctgaggactcttcagaccccacagagcacccaaccccagacctgggccccggccacgtgcgcatcaaaatccgcatggacattgacgtggtcacgaggaccaataagatcagggacaggtcaggcgagggagggggcggggggatgagggactgggcggggccaagagcgtggtgggtggggccaggcagcattcagcctattggagaccatgatagacaggatctgggctgtatcaacagtggtatggtagccagagcccggggctccttagaccaataggggcccgtgatgggcggggcctaggtgcatgaggggcgtggccatgggcctgagataagatgagagcaggtataggttgagggcaatggtgggcggagccaggtgtattattaggtccctggaataagggtggagctaaaattgcaccgggtgctgagcgcagtagatcttgcctgttatctcagaactttgggaggccaaagtgggagaatctcttgaggacaggtattcgagactagcctgggcaacatagtgagaccgcctcccccccgcccccctccccca[136 bp omitted]cggtgaaaccctgcctctactaaaaaaaaaaagtacaaaaaattagccgggcgtggtagcacgcgcctgtaggcccagctacccaggaggctgaggcaggagaatcgcttgaacccaggaggcggaggttgcagtgagccgagatggcgccactgcactccagcctgggcgatagagcgagactccgtctcaaacaaatgaataaatgaataaaattagccaggcgacttgggaggccgagctggggggatcgtttgatcccgggaggtcaaggctgcagtgagctatgattgcagctcttcactccagcctgggcgacagagcaagaccctgtctaagaaaaaggttattcagggtggggccccgggagtttctagcccttccctacaaccggccaccatgcccctctcgcaggttttgggaccctggcccagccgcggaccccctgaccgacctgcgctacgtgtggggcggcttcgtgtacctgcaagacctggtggagcgtgcagccgtccgcgtgctcagcggcgccaacccccgggccggcctctacctgcagcagatgccctatccgtgctatgtggacgacgtgtgagctctggcacccctccccgctcttccccgcggcgggaaggtcccgggtgtgggggtgggcccaggctctgttgggaaccttcctgcggtccaggctgcgaactttgcacctttacaccactccacgtgacctgctgcagcgggaggagcaggggactctgagggtctggtggggggggggactctgagggtctgggggcccccggcgcagggacagcctgggctgcactgatgcctgagagccaaaggctggctggatcaggttccaaggaacagggaggcaaatcttcccgccttgagatcccgggacacgaaccagtcgtgccagatggtgggcggagggggggtctgcggagggtctccagcctccaccccagccgtccccaccccaggttcctgcgtgtgctgagccggtcgctgccgctcttcctgacgctggcctggatctactccgtgacactgacagtgaaggccgtggtgcgggagaaggagacgcggctgcgggacaccatgcgcgccatggggctcagccgcgcggtgctctggctaggctggttcctcagctgcctcgggcccttcctgctcagcgccgcactgctggttctggtgctcaaggtgggcgcgcctcggcctgcccggctgcagaatgggtgcgctggagggtgacagacaggggcggccccacgtgggtgcgcgcccccaggccaatccaggagctgcaccctaagctcccgttgcctctcacagctgggagacatcctcccctacagccacccgggcgtggtcttcctgttcttggcagccttcgcggtggccacggtgacccagagcttcctgctcagcgccttcttctcccgcgccaacctggctgcggcctgcggcggcctggcctacttctccctctacctgccctacgtgctgtgtgtggcttggcgggaccggctgcccgcgggtggccgcgtggccgcggtgagagccgggtcgggcgtggatgggggacgccccccgcttcggccgctcactgaccgcccgcttttccgcagagcctgctgtcgcccgtggccttcggcttcggctgcgagagcctggctctgctggaggagcagggcgagggcgcgcagtggcacaacgtgggcacccggcctacggcagacgtcttcagcctggcccaggtctctggccttctgctgctggacgcggcgctctacggcctcgccacctggtacctggaagctgtgtgcccaggtgggccgtagggggcggggctccgggccgggtcgcacctgctttgcgggaggctgagctaggggtgtggcctccaggccgtttgggggtggggggtggcttattcccttggagagaaggcggggcttcttggcacacgcatgcaggtggctgcattggaggggcggggcctgaggcaggtgggcggggtttctgggccgcctcatacctggacgccctgattccaggtgtatggccagaagctggcacagtcgccgggcgctgtggctcacgcttgtaatcccagcactttgggaggccaaggcaggagaatcgcttgagcccaggagtttgagaccaggctgggcaatatagtgagacctcatcaatacaaaaagttagctgggcgtggtggcacgctgggcgtggtggcacgctcctgtagtcccagctactcgggaggatggggtgggaggatcactcgagcccaggaggttgaggctgctgtgagccgtgatcccaccagcctgggcaaca[151 bp omitted]accccgtctctactaaaaatacaaaattagctgggtgtggtggcgggtgcctgtttcctagctacttggaaggcagaggcaggagaaatgcttgaatcccggaggcggaggttgcggtgagtcgagatcgcgccactgcactccagcctgggcaacaagagtgaaactcagtctcaaaaaaaaaaaaacaaaaaaaaaaaaaacaaggccgggcacggtggctcacgcctgctttcccagcactttgggaggccgaggtgggcagatcacgaggtcaggagatggagaccatcctggctaacacggtgaaaccccgtctctcccaaaaatacaaaaaattatccaggcatggtggcgggcgcctgtagtcccagctactcaggaggctgaggcaggagaatgacgtgaactggggaggcggagcttgcagcgagtcaaaatcgtgccactgcactccagcctgggcaacagagcaagactccgtctcaaaaaaaaaaaaaaacaaaaccccaaaaaaagcctggtacactcctggggggtgggctaagcaataacccgcgcccctccccgcaggccagtacgggatccctgaaccatggaattttccttttcggaggagctactggtgcggacctcggccccccaagagtccagccccttgccccaccccgctggacccaaagggtgaggcactacgaggcttaatagctggttgtccacatatgcccagttcccccccaaaacgagattccacagatgccaatgacaatgacctggacaccccaaccctcacacctgccctgaagacactgcggtccccaagctcccgcagcttttataggccccggcccagcaggtcccggattccacagcccagctctgagggacttgcaggccccaggacccccatgacctccatggctgagtccaccccatctctgcagtgctggtagaagaggcaccgcccggcctgagtcctggcgtctccgttcgcagcctggagaagcgctttcctggaagcccgcagccagccctgcgggggctcagcctggacttctaccagggccacatcaccgccttcctgggccacaacggggccggcaagaccaccaccctgtgagcccccaaccactccctccccgtgagcccccccactcccaccccgtgagcccccccaccactccctccccgtgagccccccaccactccctccccgtgaaccccccaccactccctccccgtgagcccccccaccactccctccccgtgagccccccaccactccctccccgtgaaccccccaccactccctccccgtgagcccccccaccactccctccccgtgaaccccccaccactccctccccgtgagcccccccaccactccctccccgtgaggccccccaccactccctccccgtgaaccccccaccactccctccccgtgagcccccccaccactccctccccgtgaaccccccaccactccctccccgtgagcccccccaccactccctccctgtgagccccccgaccgctccctccccgtgagcccccccaccactccctccctgtgagcccccccaccactccctccctgtgagttcccccaccactccctccctgtgagtcccccaccactccctccctgtgagccgcccaaaccactccctccctgtgagccccccaccacttcctccctgtgagctccctgtgaggcccccgaccagtccctccctgtgagcagtaatggcgccactgcactccagcttgggcaacggagtaagaccctgtctcaaaataaatagggcgggagtggtggctcacgcctgtaatcccagcacttgggcaagccgaggtgggaggattgcctgaggtcagagtttgagacacagcctggccaatatggcaaaaccatctctactaaaaatacaaaaattagccgggtgtgatggtggcgtgcacctgtaatcccagctactcaggaggctgaggcaggagaactgcttgaaccctggaggcggaggttgcagtgagccgagactgtgccgttgcactccagcctgggcaacagagtgagactctgtcacaaaaaaataaaaataaacaaataaataaaaataaggctatcacagggttttggatgtagcatttaataggtg[133 bp omitted]aaaatgcaaaaaaattagccggacatggtggcgggcgcctgtagtcccagctactcgggaggctgaggcaggagaatggcgtgaacccgggaggtggagcttgcagtgagccgagatcgtgccgctgcactccagcctgggcaacagagtgaaactccgtctcaaaaataataataataataataataataataataataataaataattaaaaattttttaaaaacagaaattaaaaatagaagctctgtaactgccagtgcactctgtgaagggggctactctgagacccctctatccacaggtccatcttgagtggcctcttcccacccagtggtggctctgccttcatcctgggccacgacgtccgctccagcatggccgccatccggccccacctgggcgtctgtcctcagtacaacgtgctgtttgacatgtgcgtctcggcaggcccagagtgcagcggtgggaagggactggacgccctctgggactctgcctgccatgtgggtcactctgctctgtgcactggccgcaggctgaccgtggacgagcacgtctggttctatgggcggctgaagggtctgagtgccgctgtagtgggccccgagcaggaccgtctgctgcaggatgtggggctggtctccaagcagagtgtgcagactcgccacctctctggtgagcccatccccaagggaggtcacctcacagggaggggcctggggattcatcctgaaggcagggggaagccgggtactgaggtccacgtgggtaggcaaccttgcccaaggctgggtgtgacacactgaggtcccttccccatctctaccaggtgggatgcaacggaagctgtccgtggccattgcctttgtgggcggctcccaagttgttatcctggacgagcctacggctggcgtggatcctgcttcccgccgcggtatttgggagctgctgctcaaataccgagaaggtaagagctggggattctgctcgaggggccagaaaaggcttctgacaaggaagtgctggggatggggttttgaggaatgagtaggagtttgctacatgtggaccccacttgttgctatggcatttaggggctactgctcaaataccgagacagtaagagttggggatagacagaggttcccctggattctgcctgaagggccagaaaaggtttccaacaaggaggttctggggatgaggttttgagggatgaataggagtttgcttcatggggcagacaactcctggcagaggccccagctcgggcaaagacgcggcggcctgatggtagttgtgggttggtcccccgtgcctaggtcgcacgctgatcctctccacccaccacctggatgaggcagagctgctgggagaccgtgtggccgtggtggcaggtggccgcttgtgctgctgtggctccccactcttcctgcgccgtcacctgggctccggctactacctgacgctggtgaaggcccgcctgcccctgaccaccaatgagaaggtggggaccggccttctcctgacccctgacccccgggactctgttcagccctgaaggccaagccacttggtgcctctctgcccgcaggctgacactgacatggagggcagtgtggacaccaggcaggaaaagaagaatggcagccagggcagcagagtcggtgagggccggggtgggagacccaaggcgggtgggcagtggggtggctgtgccttaacttgaggaggaggagggggagggggaagaggaggaggagggggaggaagcggcagaggaggttgaggcggaggaggagggggaggaggagggggaggagtaagaggtggaaggggaggcgaaggggaggagtaggagggagaggaggagggggagggagaggaggagggggaggagaaggggggaggaggaggggaagggagaggaggagggggagaagaaggggaggagtaggaggggagcagaaggggaggaataggagggggaggaggagggggagggaaagggggaggagaagggggagaagtaggaggaagaggagggggaggagaagggggaggagtaggagggagaggaggaggagggagaggagggggaggagaaggagaggaggaggagagcacttgagaacctgagatgatgcccccatccctgggctgagccggaaccatgagactaacttgaacactgaccccacctttaacccaaccagggctgagcccagagacaaacctacccctgacctccaacactaggtccagcactgccctcaagatctctttttgtttgtttctgagtcttgctctgtcgcccaggctgtagtgcagtggtgtgatctcagctcactgcaacctctgcctcctgggttcaagcatttctcctccctcagcctctcgagtaactgggattacaggtgggttccaccatgcctggctaatttttgcatttttggtagaaatggggtttcaccatgttggtcaggctggtctcaaactcctgacctcaggtgatctgcctgcttcaaccctcaaagtgctgggattacaggcgtgagccactgcgcccggccgcacctggcctacgttcttaaccctgatctctgtctgccgggacagtcccctcacaggtcaccaatgcctcttccccagggagactggggtggggcgtgagccggggctccctgaagcacccctttgtccacacaggcactcctcagctgctggccctggtacagcactgggtgcccggggcacggctggtggaggagctgccacacgagctggtgctggtgctgccctacacgggtgcccatgacggcagcttcgccacactcttccgagagctagacacgcggctggcggagctgaggctcactggctacgggatctccgacaccagcctcgaggaggtgtgaggcctgggtggtggtgaggtggggccaggaggagggcttcctggaggaggtggtgttttgaaggatgaatagcgtgtttatgagcagcaaggacattcagggaggaggcatggcacatgaggagctctggtggctcagatgtcccttgggaaggcctgggggacccatggtgtaggaggggtggggggctcacaagcccccagttctccctgtcggtgtccagtctctgagcccctgcttgtctccccagatcttcctgaaggtggtggaggagtgtgctgcggacacagatatggagggtgcggccacagctccctgacccctgaccccagtccagagtgggaccagaggccaggtccccatccctggcttagtgtggcccaaggcatagcctttaccctatacctgattcctgatcccccaatccgtgaccctcaactttgaccctgacccctgatggccctgcagatggcagctgcgggcagcacctatgcacaggcattgctggcctagacgtaaccctacggctcaagatgccgccacaggagacagcgctggagaacggggaaccaggtaagtccttcccagtggccctggggtcctcccagccacccccccacagcagcgtgagcactgaccctctcatccctcacagctgggtcagccccagagactgaccagggctctgggccagacgccgtgggccgggtacagggctgggcactgacccgccagcagctccaggccctgcttctcaagcgctttctgcttgcccgccgcagccgccgcggcctgttcgcccaggtgaggagggctagcaccagggagtcgcatgggagtccctgagttccctaccctggccgtccactcagtggcctaatccaaacccttacccccgtgtgtattcccaacccaaagcacatttattgagggcactggggagccatgggtggttgtagagcaggagcagggacaggtgcaagcaagcctggagggtggatggaagcagcagctgatgggctggtcccccagatcgtgctgcctgccctctttgtgggcctggccctcgtgttcagcctcatcgtgcctcctttcgggcactacccggctctgcggctcagtcccaccatgtacggtgctcaggtgtccttcttcaggtgggtgcagaaggaaggggctggtggcaggaagactagggacctgggggtacagccctgaccctacatctcccctcacacacagtgaggacgccccaggggaccctggacgtgcccggctgctcgaggcgctgctgcaggaggcaggactggaggagcccccagtgcagcatagctcccacaggtgaggcgtcttgttggcctggacctttcccctctctggcctcagttttcccatctggtccctggccagggagcctcagggggcacctggagcatcccctgtgcccacctgggagctgggagcctctgtggctccaggaacccccagaagctgggtgcccacagaccttcaccttgaccctgcagcgcccttgagtgtgcacagcccattgtctgcaggttctcggcaccagaagttcctgctgaagtggccaaggtcttggccagtggcaactggaccccagagtctccatccccagcctgccagtgtagccggcccggtgcccggcgcctgctgcccgactgcccggctgcagctggtggtccccctccgccccaggcagtgaccggctctggggaagtggttcagaacctgacaggccggaacctgtctgacttcctggtcaagacctacccgcgcctggtgcgccaggggtgagccatgccctgggactcagtttccctggctatagcatgggtccttgggttgctggggctggtgtggtcctggaggaggaagtggaggggttggatgcccagcttggggctacgggctgggagtctcgcgtaccttcctttcctctttttttttttttttttttttgagatggagtctccctctgttgcccaggctggagtgcagaggtgtgatctcagctcattgcaacctccacctcccagtttcaagcgattctcctccctcagcctcccgagtagctgggattacaggcacgcaccaccactcccgactaatttttgtatttttagtagagatggggtttcaccgtgttgccaggctggtctcgaactcctgacctcaggtgatccacccgccttggcctcccaaagtgttgggattacaggcaggagccaccgcgcccggctttctttcctgtttttgtccacccttgactctgtgctcccctctcaccatctctctctctgtcccacatccctgtctgcctgtgtctctgtccatctctcccacagcctgaagactaagaagtgggtgaatgaggtcaggtgaggaggggtctagcttggggtcccctgccccagttccactcccatgccctctgcctgccccctgggagctctcccggcccccccggccctcagctccccttccctgcctgcatggccccacagatacggaggcttctcgctggggggccgagacccaggcctgccctcgggccaagagttgggccgctcagtggaggagttgtgggcgctgctgagtcccctgcctggcggggccctcgaccgtgtcctgaaaaacctcacagcctgggctcacagcctggatgctcaggacagtctcaaggtgggaactgggggggcaggtgggcgtcctgtcacagcaaggtccaaccccattgctctgaccctatgaccttgacccccacccagatctggttcaacaacaaaggctggcactccatggtggcctttgtcaaccgagccagcaacgcaatcctccgtgctcacctgcccccaggcccggcccgccacgcccacagcatcaccacactcaaccaccccttgaacctcaccaaggagcagctgtctgagggtgcactgtgagtccctccaccctgcatgtcctaccctgcacgtcctaccctgcctccatttctctgtcgtttggggtggtgggagctggatttgaaccctgacacactcttgctttataaatgggggatagaaactgttcctctgctccctaagccagggaaatgggacctcctcagactcagcgggccccagcctcccccacacatcctcatcccaccaacctttatcctgcctgagacctgtacaacctctgctgccaaatcccaggcaccctcatccctaaattgcccctgccatctctgccactgctgactgccccatagacctttgtcccatcaatggcgtgttcagctctgctctgagcaacccatgcaccctcaccctacaacagctctcatgtcttcacctccaggatggcctcctcggtggacgtcctcgtctccatctgtgtggtctttgccatgtcctttgtcccggccagcttcactcttgtcctcattgaggagcgagtcacccgagccaagcacctgcagctcatggggggcctgtcccccaccctctactggcttggcaactttctctgggacatggtgcgggggctgcttggacgggtgggggcccagccactgcttgccactgccctgtctggccccttgtaggcaggggcttgtccaagatggcctgggtaaagtcttgaggattgtgggagactttgtgccttcctactcaaaaagcaaggaggtcagggtgggaacagggctgagggtggcagtgcccacctctttaggctgataaaggtaactgccatctccaatgcagtgtaactacttggtgccagcatgcatcgtggtgctcatctttctggccttccagcagagggcatatgtggcccctgccaacctgcctgctctcctgctgttgctactactgtatgggtgaggcccccagtccctcagggcctattcttactgaccccttactgccttccacattaatgctgctgagatagaactctgcagtgactcccaaggagaggatatggaggtctgaggtgatgccgtgtgtgatccaattcagtggtgtgccaaggtggccttaaaagctcatcttatcctgactcatattagtagagttctaaggcagcccatgcctgtaattccagtactttgggaggccgaggcaggaggactgcttgtggccaggagtttgagaccagcctgggaaacatagagagacccacctctaaaaaagaaagaaagagagagaaagagaaagagagaaagaaaaaaaaaaaaacagaaatgtgctttgggtgaaaatgtcaaggtctaaggcagagaagatgggaatggagatttttattcctctcagggcttctcagtctgagtggttactccagtgactcctattgtcccttcagctggtcgatcacaccgctcatgtacccagcctccttcttcttctccgtgcccagcacagcctatgtggtgctcacctgcataaacctctttattggcatcaatggaagcatggccacctttgtgcttgagctcttctctgatcaggtggggcaccacgaggctggggcttgggctgggttgggtcgttggactcagcccctgaccaacatccgtctcccacccttgagcagaagctgcaggaggtgagccggatcttgaaacaggtcttccttatcttcccccacttctgcttgggccgggggctcattgacatggtgcggaaccaggccatggctgatgcctttgagcgcttgggtgagaacttcctgtcaggtggggccatggctacagatagctagcacccttggagacctagagttaattatacagagtggagaaaaacagccccccagggagacagccagggttcttaggtggccctaaggttgggccaagttggaggtacaagaaagcagccataaaaagctaattcttagattacatcacaagaggcctcttctgttttctatgccaattagactccagctgagtggcctatccaatttgtgttcctttcccttaagaatccagagtgacatggatggagaaagggccagaaaccaagactctcatggacccagtccctcctttctatatccacaggagacaggcagttccagtcacccctgcgctgggaggtggtcggcaagaacctcttggccatggtgatacaggggcccctcttccttctcttcacactactgctgcagcaccgaagccaactcctgccacagttagtgaggtctatggagagggtggcaggggccaaggacctactttaagcccacagatattctgtccccaggcccagggtgaggtctctgccactcctgggagaggaggacgaggatgtagcccgtgaacgggagcgggtggtccaaggagccacccagggggatgtgttggtgctgaggaacttgaccaaggtaggtgtggtcaggtcgactgctgggtggggggtgctcccactggcccactcacctttctgaaagacctgcactctcccaggtataccgtgggcagaggatgccagctgttgaccgcttgtgcctggggattccccctggtgaggtgagtccaggggtggaggccaggtgcagggacagtgagtggctgccctactgcatgccctgcccatcatcctttactgaacacctactgtgtatccaccaccttttattgggcacctactgtatgccaatatttgtgctcctatttttattttattatattattatttatttatttatttatttatttatttatttgagatggagtctcactctgtctcccaggctggagtgcagtggtgggatctcagctcactgcaagctccacctcccgggttcatgccattctcctgcctcagcctcccgagtagctgggactgcaggcgcccaccaccacgcccggctaatttttttgtatttttagcagagacggggtttcaccgtgttagccaggatggtctccatctcctgacctcgtgatccacccgcctcagcctcccagagtgctgggattacaagcgtgagccaccacacctgccctattttatctttttttagagacggagtctcactctgtcgcccaggctggagtgcagtggtgagatctcggctcactacaagctccacctcccgggttcacaccattttcctgcctcagcctcccaggtagctgggactgcaggcgcctgcca[184 bp omitted]ctactgcatgcttacctctgttaaacacacactgtgctcactaaagaggtgtactgaatacttttgtgtccatcaacgtttatcaaataccaatagaatttattggacccctattgtatacacatctacatcaagcacttgctcacagccagcatttatcaggcacctgctttgtaccagttcacattcaagcacctactatatacaaatgtatttgctgtgtgccacttattggccacctactagggctggtacacatctgcaaacaagtgctgtttgttagcacacattgcagtatatatatatatttttttttctttttttttcttttgagatggagtctcactgtcacccagcttggtgtgcaatggtgtaatcttggctcacggtaacctccgcctcccaggttcaagcgattctccagcctc[133 bp omitted]tggcctccgaaagttctgggatcacatgtgtgagccaccatgcccggcctttgtttttttctttttttttttttttgagacaaagtctcgctctgccacccaggctggagtgcagtgtcacgatctcggctcactgcaacctctgcctcccaggttcaggcgattctcctgcctcagcctcctgagtagctgggattacaggcgcccgccaccacaaccggctaatttttgtatttttagtagagatggggtttcacaatgttggtcaggctgatcttgaactcttgacctcaggtgatctgcccacctcggcttcccaaagtgctggggttacaggtgtgagccactgggcctggcccacagtatatctttactaagcacctactgtgtgctggccaacctctctaccttgggctgactgtgcacctagcctaagtacacacagtgtgccaggaaacatatggagagctcatgccctgatatttgttgagcactgctgcacacgacctttatagggtacccactgtgtgccaaaagccattccctgctaagtgacagctttatgcctcgctacataccccaatatctgcctagctcccccggggccccacccacggccttccatgtggacactcagaaatcagaggtgctgaggccaggcgtggtggctcacagctgtaaccccagcactttgggaggccaaggcaggaggatcacttgaggtcaggagttcgagaccagcctggccaacatgccaaaaccccgtctctactaaaaatacaaaaattagccgggcttggtggcacacgcctgtagtcccagctactccggagcctgagacaggagaattgcttgaacccaggaggtggaggttgcagtgggccaagatcgtgccattgcgccggggtgacacagcaaggctccgtctcaaaaaaaaaaaaaaaaaaaaaagaggctgggtgccgtggctcacgcctgtaatcccagcactttaggagttcaaggcaggcggatcacaaggtcaagagatcgagaccatcctggccaacacggtgaaaccccatctctactaaaaaaaaatacaaaaattagctgggcatggtggcaggcgtctgtagccccagctacttgggaggctaaggcaggagaattgcttgaacccgggaggcagaggttgcagtgagccaagatcgcaccactgcagtccagcctgggaaacaagagcaaaacttggtctcaaaaaaaaaaaaaaaagaaatcagagatgccggaaccagggcctggggcctcactgagcaccatctgtgggcatccctgtagtgttttgggctgctgggtgtgaatggagcagggaagacgtccacgtttcgcatggtgacgggggacacattggccagcaggggcgaggctgtgctggcaggccacaggtgaggggtgccaggtagggtcagggtggggcagggttggccctgacgtccttgtgcttccccacccctccacctccagtgaatggactgggctcactgccccacacctgcatggtctctgagacccctgcacctctacctcccacacgcggaccaggccctgagacacccctgtcccttatcagcgtggccctggatgggtgggccctgagacccctgtgttagccaccagtatggtcagggactagccagctctctgagcccccggcgcccccatccccagcgtggcccgggaacccagtgctgcgcacctcagcatgggatactgccctcaatccgatgccatctttgagctgctgacgggccgcgagcacctggagctgcttgcgcgcctgcgcggtgtcccggaggcccaggttgcccaggtgagcccactttgtccccaccgctctcacctcccagggcccacccgacccaggccgtgcctctaaagcctggcccaatcccgcactctctcgccttggctccatccctgtccctgcccccagaccgtgcttccttcccctatacctctgtcccccatcctggtccaatagggatgtggctagcccgcctctttgccccgcaacaccaagttccaccattctcattggtccacccacccttccttccgctgcacgttgcccctctctccttgactctgccttctgtggccctgcccacttgctcctcttctgcctaccccctagggcttcgcgcctttctcgctggggtcacggtcacattctcactctggccgttcccagtttgcagccgtttcactgcctcttccatctgcttgggggtcttgtctttgccctggcccgccccaccctcacactgtcccaccccatgccctttctggccctgcctcatacccatgttggctccacccacaccatggccctgctccatacccatcccagctccacccataccaaggccccaccccatactcatgctggctccacccacaccatggccccgccccatactcatgctggctccacccacaccatggccccgccccatactcatgctggctccacccacaccatggccccgccccatactcatgctggctccacccacaccatggccccaccccatactcatgctgtctccacccacaccatggccctgccccatactcatgctggctctacccacaccatggccccgccgcatactcatgctggctccaccagtgtggccccgccccatactcatgctggctccacccacaccatggccccgccccatactcatgctggctccaccagtgtggccccgccccatactcatgctgtctccacccacaccatggccccgccccatactcatgctggctccacccacactatggccctgccccacacccatcccagctccacccacaccatggccccgccccatactcatgctggctccacccacaccatggccccgccccatactcatgctgcccccaccacactatgtcccattctcacatttgccctgccccatgcccattatgcccctgctccacactcaatgctggccccgccacactgtggccctgccccatactcatcaatatgagtccccatgcctactctggccccaccccacagaccgctggctcgggcctggcgcgtctgggactctcatggtacgcagaccggcctgcaggcacctacagcggagggaacaaacgcaagctggcgacggccctggcgctggttggggacccagccgtggtgtttctggtgcgtgggagcggtgcctgggtggggtggggcctgcgacggaggcggggccttgcttatgggatcttccgtgctccccaggacgagccgaccacaggcatggaccccagcgcgcggcgcttcctttggaacagccttttggccgtggtgcgggagggccgttcagtgatgctcacctcccataggtgggccgggctctgatgccctgggctgtggttaaggtgatccaggcctggagagagagccccaaagcacaaggccacaggggatggggggtcctggccctagtggggcgagggcgccaggccccggggtgtaaggacacacagaggtgggacgcggcgccgggatcagaacggtctggggaagagtggggagatgtccacaccagaagggtggcccaggccgggggaagcaggcagtgtggcgccaggcacaggtggccccggcctcacggagctcgtggtgccgggtcccgacagcatggaggagtgtgaagcgctctgctcgcgcctggccatcatggtgaatgggcggttccgctgcctgggcagcccgcaacatctcaagggcaggtgagccggcgcggcctccaggcaggtgtggggtgagggtgggcacgtaggtaggctcaggggagaggccagacgtagagccgggtgaggaaagtttggctccaactggagagatggccaaggctttagattgtcctgcaggggtgactgagggggcgagacaggctggggtgtgctgggggcgcaggaccaggaggcgtgagccgggggctctgggtggatttagaagacacaatcaggtgtgcgttggagtaggtgcagcctggagaggtgagggtggattgatgggtggagttaggggagggcctggttagtgggcggggccataggaaagtggggcgggggtatttattgtgtgggcgggggtagagtgcaagggcgaaagaggagtgtccgaaaaaggagtcaagtggggtgatagcttcgagagcaacctgggcaacctagggagaccccatctctataaaaaatttaaaaattagctggacatggtggtgtgtgcctgtggtctcagctacgcgggcggggggtggcgggggactgagacgggaggaccacttgatcgctagggtagtacaagtatggggcggggccagagagtattaggggctggagggtgagctgaggtgggacctgggaaaggcccgatccggtagccctggccccactcactgcagattcgcggcgggtcacacactgaccctgcgggtgcccgccgcaaggtcccagccggcagcggccttcgtggcggccgagttccctggggcggagctgcgcgaggcacatggaggccgcctgcgcttccagctgccgccgggagggcgctgcgccctggcgcgcgtctttggagagctggcggtgcacggcgcagagcacggcgtggaggacttttccgtgagccagacgatgctggaggaggtgatcacggcgccggggtcgggctgggggaggcaggctgggggccaggcccgtgggctgaccgtccctcttgtcccctctgggctgcccaccgctaggtattcttgtacttctccaaggaccaggggaaggacgaggacaccgaagagcagaaggaggcaggagtgggagtggaccccgcgccaggcctgcagcaccccaaacgcgtcagccagttcctcgatgaccctagcactgccgagactgtgctctgagcctccctcccctgcggggccgcggggaggccctgggaatggcaagggcaaggtagagtgcctaggagccctggactcaggctggcagaggggctggtgccctggagaaaataaagagaaggctggagagaagccgtggtggtgaaaccgtgtgcatgtgtgtccttgagccaggctgcacacatgtccacacagctgcctgcacatgcgtctggatatggctggccccttgcaagctgagtgtgcacatacgggccaagtggcgattcataggacacaggtgtgagcgtgcctacagctgaccggatcccagctgtaaatgcctctgtggccagcccaggagttggggatgtgagtgcgggcctcataagggcctggtcacaccgtccctgtccccacgtccctgcgtgcctatgtggggctggcgcctaagggcggtacctgtaagtgcctggccataaagtggggatgaggtcaggactcaggaatgtcctgggaagcttacaggagcccggtgtcccggagcacaggccagggccgggccagaagcccatccgacatccagctgaccctcaccctctgaccccagccctcagcgccatgagtcgggggcaaagagttctcaagggtctgctgggctgggtttgcacttggacctgggcctggagagccagacttggagcaaggggctgtggccttcatgtcctgtgccccagagatctgcccctcccacccgaggtaggtgggaatggggtttgggaaaggaaagaggttggggttttgggattgggggtggggttctggaaggggacagcagggagacttggggaggggggagagagttcacactgcggggtgggggttgggggaaggtaggaggctgggatctgtatgcctgcagatgccccagctcttggccaatgccgcctcaggctgttatcagcaacgggtgcctgcgtcctgctgcccagcacgtccggtggtccagagtcactggaatgcagcttgggaggcggggctggggaccttagctaagggcaggtctggggcaacatgatatggcccacagggctgctgagaggtaaccaggtgtcctcagcatattctgccgatggtggggtccacaccacactttggggacccctgtgcaggcagcccaggaccaggtggacgtggggacccagacggacgtggggacccagacggacagggcccggtaacctggattgttctgacttcctggacgtctttgcccccagggtttcggttctgggcctcagtttccccacctgtcctcgacctgacccacttcacggggctgcagggcgggtgatgggggggaccctactctgcccggccctgctggggcccggccacaccctagggtctgcaggagaggcggtggagcgggcttgccttcagggaaaagggggctgcaggggcgcagcttcggcctgtgcgtgtgtctggggtctgagggcgaggctccaggggcttggtggcgtctgagcgcgtgtggaggtccgggtctctgcgtgtcatcgtgcacgtgtctgtgcacgcccactcgcgtccgggagtgagagtcagcgccctgcagtcggccgccccgtgcccgccagcgtcaggcaggggctcccggtcccaccccgcgagcggcgcggctccgagctcccgaaggcggaagcggggggcgcggcccggggctgggggcggggcctgcgacctcaccttcgcgcccactccgcagagccgcaggctgaggccgggaagggtcgggggcgaggccgcgtcgccgcctccccgaagccttttcctgttggggggagggcccgccagtgacggccgggcctgtcacgtgggcctgacagctggggagggggtggccggcgacaatgtggtcccgaagcggccagcgccgggagctgcagcgctgagacccccagcccgccccctcgggctcccggccggggccccatcatgttctccaggaagaaacgagagctcatgaaaaccccttccatctcgaaaaagaaccgcgcgggaagccccagcccgcagccctcgggggtgagtggagcccgggtgagacccggagctgacgccgggccgcagggggacagggacccgccctgtgctcggggctcatgctggggcggcggctgggggctcgtgccagctacagcccctaccgggcgggacggcaggggccacagcagagaggccgggaccccggcattcagctcacggtagggaccctgggagtggtggccgcctccctccactccatccagggctggccgcggggcccagggagcaggaagggagggtgccgggttgggacgatgttgtgtttgggccgctgcaggttgggggcttaggcaatctgggggctctaggggccgttgagatgggagggctgtggcctggccattgggctgaaggttgaccgggcagcagatcctctaatgggatccaccaggttcagaggttggggagtgtccccaggcctggggtgtctacaaagctggggggggggtctacagagcttgggggtccgggatgtctacaaggcctggggctgcccataggctctggggttccatggacctttaggggacagacagagtcagaagtgtgttcacttaaagcacctgcgttgtaggagcctgaggggggcttgaagggctgaggaccctccccacccccaccaggaagtggggacccccctcccgcgcctccccgcaggccccgccccggctgtggtttgggcaaggaccgttgtttgtgaaagctctagggaagaggatgttgggtaacaggtgggggggtacactaccaaatctcggccctgtgacctctggcctttgacccctgtggggtcagggtgatggtggccctccacagccccacttcatttctggggaaactgaggccgtgtccaggccggaaaatccctttaacgagctcccctcggacctgcccaaggagctgcccaggaaggatggggctgacgcggtgttccccggaccaagcctggagccgcccgctgggtcctccggcgtcaaggccacagggaccctcaagcggcccaccagcctgagccgccacgccagcgcggctggcttccccctgtcgggtgctgcctcctggacactgggccggagccaccggagcccactgacagccgccagcccgggcgagctgcccaccgagggtgccggcccggacgtcgtcgaggacatctcccatctgctggcggacgtggcccgcttcgctgagggccttgagaaacttaaggagtgtgtgttgcgtgacggtgagagccacggggacaccgaggcctgggtggaagacagagccagacccaagggaggatggagggagggacttggggaggctcagaagggagggaggctcagatggcagggagggctgtgtggaagaggccatgacagctaaggctctgagggatgtgtaggagtttggtgggggagtccctgagcgtacactggctcaagagggtgcccactttattttttttaaaggatctgatggcaattaggagggaaaggcagaggaaatgtcccatgcacaggctcagaaacacggaaacagagaatgcatttgggggccaaggtgtggggtgccgctggtgtaggatgaaggcatgacaacgccaggcagaagggcaatggggagccatagaaggtgttagagcacaggacagatgggggcagatctgtgtcttggaatgaagcaaactgggggttggctgaggtctgggtggagagagattcaggaggcatggcgaggggcaggatggggtcatcaggcggcggaggtgctgggacccagcggcctgcaggccggcagttccgttttctcctccacgcggccgctgacagccctgcttcctgccgagttattttcatctgcttcctgtttgtccctggcagcccaggcgggcacctcatgtgctgccttcagcccccggctcctcccagaaaccacagtgccagggtcatgccaggcgctctgatctgctcccagcagccgcccattttacagatgacgaaactaagtctctagtgaggccctgacccctggctcacccagccagggcagggcagagccaggactggacctcaagtggtggagtggcctctgcaccttcagggcactagttggggaaggcccggtccccactgggaggagtgggagcccccgggttatctggtcccaggggcgggggctaggctgctttcctggggaaaccctaatctcggttcctttccgatcctggcgcttccttggaggcctggcctgggcggggctcagctcccaggctcctgcaggaggtctgaactgggccagccagggtggggcacttttttttttttttttttgatacagggtcttgctctgttgcccaggctggagtccagtggtgtgattgaggctcactgttaccttgaactcctgggctcaagccatcctcctacctctgcctcccgagtacctgagactacaggcatgagccactgcacct[136 bp omitted]ggctcccgagtagctaggactacaggtgcgtgccaccacacctggctaatttttgtatttttagtagagatggggtttcaccatattggccaggttggtctcaaacccctaacctcgtgatccgcatgcctcagcctcccaaagtgctgggattacagcaggcatg[132 bp omitted]cctccacctcctgggttcaagtggttcttctgcctcagcctcccgagtggctgggattgcaggggcgcgccaccgtgcccggctaattttttttctttcttttttttttttttttagtagagatggggtttcaccattttggccaggctggtcttgaactcctgatctcaagtgatccacccacctcggcctcccaaagcgccaggattacaggcgtgagccatcgcgcccggccagtttttgtattttttgtagagaccggggtctccccatattgcgcaggctggtctagaactcccgagctaaaaaccgttctcccggctccgcctcccaaagtgctgggataacaggcctgatccaccgcgcccggctgggggcgccttctgtgcgtctcggggccgccccaggccagagaagaccctggcggctaggatgtgggctctagtcccgatgtttctcagctgctgagaccctggcaagccccttccctctctaggtgtcaggtgacttatctataaaatggggccacctgcatgcagcgatggttgtggggtccaccccacagcttggggacccgcgttcaggcagctaggaggggacccacatggacggtgccaccccgacacttcccgggcttcctcgttcccgggcttcaggtctgggcctcagtttccctgcccgtcctcgaccctccccacctcgaagctctgcggttaaggaaggacccaggctggggcgaacgggaccccagggcggggtttccctcgcgggggcggggcctcctgaccggccggagccggtttggccaccggagacccccatcggtcagctgccaggccccacgcgctcgcggtctccgcgccccgacggctgcgccatgtgtatctgcgggacggcgcacccggtgctggacgagggccccgtgcgctgccgggcgggcccccgaggtgaggggacaggtgccgggcgctgggtcccgccgcgtccgggagcacgtggcgctcgggccgtttgccgcccgcggtgggggagcagcggctgccgcgcgcctggcctggccgtgcgcacctgggcatccctgcgctgcgcaggggtcgcgccggccgccggcttcccgggtagggggtgtgcggggacagccgggggtccgtgcgccggccgcgcgcggagtgccgggtgcccggctggaaggtcccgagaaggggcgtggccggggcctcccagcggcttcccggagctcctggagccccaatcccattcccggagtccgcctcgcatccagcagcgaagacatgttccggtccggggtctcaggcccggcggcggccagcggggtatctctggcgggtgactcggtcggtctcttcccggaggtgacattcacctggggtcttcggtgccgaaagggatggggcacttactttttcagatttcatttcgtatttggggcatcctctgagcggtacagtcaggcgtcaaagctgcccctcccgctggcctctgtcctcccgggtacctttcccctcctacgaattccgtgggtttgtttccactacgtggtgtgtgcctggctctcgatgtttcgcctgtactctctgcttttttcttttctttccttcttttcttttctttccttttctttctttcttttctttcctttctttttgggatggaggagtctcactctgtcacccagctggagtgcagtggcgcgatctcggctcactgcaacctccgcctcccagcttcaagcgattctcctgcctcagcctcccgagtagccggcattacagaggagtgccaccacgctgctactttttgtatttttagtagaggcagggtttcgccatgttggccaggatggtctcaaactcctgacctcaagtgatctgcctgcctcggcctcaccaagtgctgggattacaggcatgaggcactgtgcttggccctctctgcttttttcttcttccaattgagaacgttcgatgagggcatttagctttttattctttattttatttcttacagagacagggtcttactgtattgcccaggctggtcttgaattcctgggctcaacccgtcctcctgcctcagcctcccaaagtgctggggtcacaggtgtaagccaccacccctggctgaggagggcagtgaaagccaggttccaacagtcagatctgacctcctctgttctaacaccttctatggctccctattgccctggagataaagccaggcaggatccctctgcctggcgttctcacgccttcagagctagcgtagatggaaaagctgtgtgattgttgagaaatggcttcccctctctatgcctcagtttcctcacttaggaagggcagagagagacctggacagggctttgagcagtcctgaggagttagggcagggaaggagcctggtgggctgcatggaggaaggggctgcaggactgtagcttgaaggacaagaggcagtttgctttctggagggacaagaaaagagtgttctgagcagcagagtgcctaggccaacgtctggcctttgttgatctggccggtagcccagggagggacagtgccctccccgcggtctcgaaatgagccccaggcatctgccgtcttccacctctgcctcagtttccccatctgggaacaggagctctaaagagggaggaggtggacagactttccctgggactgggccctaccccactgctcactccgactctccccagcagacctccttgaggcccgccgcccgcgggcccacgagtgcctgggtgaggctctgcgtgtcatgcatcagatcatctccaagtacccgctgctgaacaccgtggagacgctcaccgcagccggcaccctcattgccaaggtcaaaggtcagcctgctggaacagggctgcgagggctctctgcctagaagggcatcctggaggaggggatgtttgaagtgggttttgaaggatgcataggagtttgacaggcacaagctccctcctgttccccctgggttaagggctccggtcagttcttgcagggatggtcacctcccagagtgggcccacctccttgtccttatctctgcttcccagccttccattatgagagcaacaatgatctggagaaacaggagttcgagaaggccctggagacgattgctgtggccttcagtagcacgtgagcacgggagcctgtggggcagggcaagggagcgtggggggcccgggtgtctctcgatggtgacctcgctggccctgcagagtgtccgagttcctcatgggtgaagtggacagcagcaccctcctagcagtgcctcctggggactcgagccaggtgagtggggtgggccagggccacctgtgtccagcttctggaggccagccgggttcaggtctgcagggcccagacagtcaccctgcttcccctgtgcgccttggtttccctctctgggggaggcagcaaccgtcccctgaagggtgggcactgcccagggccccgcatggggctggtctcacctgcgtctccgtcctacagtccatggaaagcctgtatggaccgggcagtgagggcacgcctcccagcctggaagactgtgacgccggtaagcccccacccagcggcaggcaggcatttgaggggtgggccattgcgcgggtcgggccaggctgagcaggcccccgttccctgcaggctgcctgcccgccgaggaggtggacgtgctgctacagcgctgtgaggggggcgtggatgccgcactgctgtatgccaagaacatggccaagtacatgaaggacctcatcagctacctggagaagcggacgacgctgggtgagagctggtgtcccagcagggtgggtctggagggagggggttctgggtgagctgggaaggccttgtcccagcacctcacacccctctccggcccgcagagatggagtttgccaagggcctgcagaagatcgctcacaactgcagacagagcgtcatgcaggaggtgggggccccgcgggcacggggcgggggtccctgggcccgggtgtgagtctcagccccatttcaagggcccagggaccaagagcaggggcttcccctctacattaacgggggtggctgcagggaccagggagctggtggctgggggtgctggggccgccctgcctccatccctccccacccagtgagccggtgccccacccacagccccacatgccgctcctgtccatctactcgctggccctggagcaggacctggagttcggccacagcatggtgcaggcggtgggcaccttgcagacccagaccttcatgcaggtgcgtggtgcccgggagggcgggctgggcgggggtgtcaccggggtacccactcacggcccgtctcgccccagcccctgaccctgcggcggcttgaacacgagaagcgcaggaaggagatcaaggaggcctggcaccgtgcccagaggaagctggtgaggcgggcgggcgggggcgggcgggggcgggcagcgggcctcggcgcaggcgcagtcccagccccagccccatagcgagggccctgcggcgagctccgcacacgccccggcctcctgcgcatgcgcggcctcgcaggctgggccgccccccccaacgccaagccgggtcggagatgctccagccccgtcgcccccagctctgcctggaaggacccaggagcccggcgctcactgctgtccctgcagaaatggggagaagccgtgcctccctcggttgtaagcagctggtctccgggttgagggagactgatggtctctcaggactgggaaagcgccatgctcctgcatgtattctttttttttttttttttgatacggagtctcgctctgtcgcccaggctgcaggctggagtgccatggcaccatctaggctttcactgcaacctccatctccctggttcaaacaattctcctgtcgc[134 bp omitted]cggcctcccaaagtgctgagattacagacgtgagccaccgcacccacccggcctcctgcctgtattctcttcccacttcgcttttgggttatttcaaagacgccggcgcctttttgtttgtttctttgcttgttttgagataaggtctcgctctgtcacccaggctggactgcagtgacgcaatcatacctcactgcagacttgccttcttgggctgcaatgatcctcccacctcagcctcctgagttcctgggtctacaggcaccagccatcacacccagttcatttttttgtattttttgtatactcactatgttgcccagtttttgtttgctttttagctgtgttaacacggtctgcagtgaaacgcaccctcctagctccttccagcacataccggcaaacacatatctgccctgttttgtacacacgaggacagctcacctcatgccctgttctgctcctgatttttatcctcacctccatatagagaggctcacccgatatcagtcagcatgaagcagcctgaaccccttttttcggctgtgcagggctcagctgaggagattgagtaggttatttcatggacgtcttgggagtggctgagctgttgctgttacgaacaccattgctatgacaagcttgtgcccctgtctcaaggatgcctgagggatcagtgcccaaaatagaactgctgggtcaaggggcgtgcgtgtatgagctaccctcccaggccacagccctgcttttcctcttctgtgaaccctcagttcttaacctttgcttagttcttatcctttgcttactttgtactggacagtggcttatcattgatttgtcagagctttttacatattagagaacttaggccttaatcatgtgagttttagactccccccattcccctcccacaatttactgtttgacttttgatttttacctg[131 bp omitted]cactgcaacctccatctcctgggctcaagcgattcttctgcctcagcctcccaagtagctgggattacaggcgccagccaacatgcctggctaatttttgtatttttagtagagatggggtttcaccaccttggccaggctggtctcgaactcctgacctcaggtaatctgcccaccttgtccttccaaagtgctggaattataggcataagacaccgtgcttggctaatttttatatctttggtagagatggggtttcatcatgttggccaggctggtctcgagtagctaggaccacaggtgtgcgccaccacgtctggctaaattttttaatttttttgtagagatggggtctcactatgttgaccaggctggtctcaaactcctggcctcaagtgatcctcctgcctcggcctcccaaagcactgggagtacaggtgtgacccatggcgcctggcggtctcctagtaattggatgagtccgtttgtttgtgtgcgaatctgatggtgcaggttgtgaggtgtggcccccgagcccacaggtttttgactaagtgctcttcctgccaacctgtgggcgcctggcttcctgcctgggcggcttctctgttctcgtctgtgaggagggaagtgaaagcaaaagagcccggagacgctcccgtgggggctggtgtgcgtgtctgcagaggctgccgtgtgagcctctgtgcagagcttggctgcacctcagcttcccgggctgcagagtgggcacacaggacacccatttctccgagtgtcctgttacgggtgcctcctcccgttcttttttttttttttttttttgagctggaatctctgttgcccaggctggagtgcagtggtgcatgcaatcttggctcactgcaaccttcgcctcctgggttcaagctgttcgcgattctagtgcctcagcctcccgagtagctgggattacaagcgtgcaccacaatgcccggctaattgttttaaattttgggtagatacggggtttc[131 bp omitted]ttgtgcagggtcctctgcatgcccagctgggccatggggccttgctgagagagatgggggtggggaggaaaggaggagctggggagactgagtcccatccgaggatagggttggaactggcctcctggctcccacacccacagcaagaggcggagtccaacctgcgcaaggccaagcagggttacgtgcagcgctgcgaggaccacgacaaggctcgcttcctcgtggccaaggcggaggaggagcaggctggcagcgcgccgggagcaggcagcacggccaccaagaccctggacaagcggcggcggctggaggaggaggccaagaacaaggtgagggcgggtggaggcagggctggaggtccctggaggaggagatccaatgcttggtgtgacatttactacctccagacctttgtttttgtttttttgtttttttgtttgtttttgagacggagtcttgctctgtcgcccaggctggagtgcagtggcacagtctcggctcactgcaagctccgcctcccgggttcacgccattctcctgcctc[175 bp omitted]cccggccaatttgttttttggagacagagtctcattctgttgcccaggctggagtgcagtggtgagatctcactgcaacctccgcctcccaggttcacacagttctctgcctcagccaccctgccaccaagcccagctaatttttttgtatttttagtagacacagagtttcaccatcttggccaggttggtctcaaactcctgacctcatgatccacccacttcggcctcccaaagtgctgggattacaggcatgagccaccgcgcccggccccgatttttaaattattattatttttgagacagtgtcttgttctgtcacccaggctggagtgcagtgacgtgatcatggctcactgcagcctctacctcctgggctcaagcaatcttctcgcctcagcctctagagtagctgggaccacag[355 bp omitted]ctcaggctgagtgtggtggctcacacctgtaatcccagccctttgggaggctgagacgggcagatcatatgaggccaggagttcgaaaccagcctgggcaacatggtgaaacccctgtatctctactaaaattacaaaaaattaaccgggtatggtgggtggggggcacctgtaatccgttacttgggaggctgaggcagaattgcttgaacccggtaggtggaggttgcagtgagctgagatcgtaccactgcactccagcctggcctacagagcaagactccatctcaaaaaaaaaaaaaaaaagatggggagggtctcaccatgttgctcaggctggtctcgaactcctggcctcaagcaagtctcccactgtggcctcccgaggcgctgggatgacaggcgtcagccccgcctccctgaggtttctgtctgagtcctgcaccccgggctgaggcctctctctgtgcgccccgcccccaccgcaggcggaggaagctatggccacctaccgcacctgcgtggccgacgcgaagacgcagaagcaggagctggaggataccaaggtgacggcgctgcggcagatccaggaggtcatccggcagagcgaccaaaccatcaagtcggtgcgtggggtgctccggccgcccgggcggggatggtggaccgggcggcctcctcctgacccctccgctctccggtgccgcccgcaggccacgatctcctactaccagatgatgcatatgcagacggcgccgctgcccgtgcacttccagatgctgtgtgagagcagcaagctgtatgacccaggccagcagtacgcctcccacgtgcgccagctgcagcgggaccaggagcccgatgtgcactacgactttgagccccacgtctccgccaacgcctggtaccgccacccagctgccctgtccccggcgcacaaggccctgcctgggagccgggcttccctctgtcgggggcatgaagatgaagctgtcttgccccccatcacctcccctccttttcccggtttcttccactaggtcccccgtcatgcgtgcccggaagagcagcttcaacgtgagtgatgtggcgcggccggaggctgccgggagccccccagaagaaggcgggtgcactgagggcacacctgccaaggaccacaggggtgagtgtccggcggggcccaggggcggacgctggctccctgcgacccaccctggcccttcaccagagacgcctctttctccagccgggcgaggacaccaggttcacaagtcatggccgctctcgatctcagactcggacagtgggctggaccccggccctggcgcaggtgagggaggctctctggcgggctggggtgtggagctgcctcctctcctgagcctcagggtttcatcacccaccggggtgatggagggggcccccctggctgggggagtctgaacagtcctgattcccgcccaggggactttaagaagttcgagcggacgtcatccagtggtaccatgtcgtccacggaggagctggtggacccagacggtggagccggggcttcagcctttgagcagggtgagggtcccctgacggggctggagagagaggggggtttggacacagtccatgggcctggccctgagctgccttggtgacaccggctgcctgtgctgcccgcagctgacctcaacggcatgacccccgagctgccggtggccgtgcccagtggaccgttccgccacgaggggctgtccaaggcggcccgtactcaccggctccggaagctccgcacgcccgccaagtgccgcgagtgcaacagctacgtctacttccagggtgctgagtgtgaagaggtgagtgggacgccccgacggacagctgggagccttcgggagcctttggggtgcccagcaccgccggcctgtgtgccctcaggaatgtccggcccagagcagggagcagtcggacgcctttggaaggaagcgaacggagggggtggggtgggctcttttagttctggggagcagggttggctctctgaggcagcgaggcagggggcagacctggagggtgaagagtcctggggctgtggccagaagacctggagggcaaaggccctggagctgtgtccagaaaaccaaggggcgggaaggagaggaggccacagggcaggcgggatcacccctggggtggaagccacgagccactgtccagcttgtgtttgcagaagctgccgtgtgggggctgtgagcgccccggggaggtggggtggagccgctgggggctgcgctgagctgggcgccccggggctgggctcactcactctggccgcccccagtgctgcctggcctgccacaagaaatgtctggagacgctggccatacagtgcgggcacaagaagctgcaaggccgcctgcagctgttcggccaggacttcagccacgcggcccgcagcgcccccgacggcgtgcccttcatcgtcaagaagtgcgtctgcgagatcgagcggcgggcgctgcgcaccaaggtgaggcgggggaggaagcggctcacagcgaggaggcgggagtgggccgaggctgatgggcctccccacccccgggctcccgcagggcatctaccgggtcaatggggtaaagacacgcgtggagaagctgtgccaggccttcgagaacggcaaggagctggtcgagctgtcgcaggcctcgccccacgacatcagcaacgtcctcaagctctacctgcgtcaggtgagacccaccggtggtggccaggcagagcctggaaggggcgtagccaggcaggaggaggcggggtgggggtccgggagctggagcaggactgagctggagcaggactggcgcaagcgggggcctggggaggacagggtgggcgggacagtgcctggcagggcagggctgaggctgggggcgtggtcacggtaggagcgaggcggggccagttctgcgccgaggcacggacagggacaggaggggcggggtggggcttggtcagcacgtggcaggggtgtggccacggcagaggcacacctgacgctgtgcgggggcggggccggggccggggctcggtggggcgtggccagagcaagatgggcgtgttcagcgcttggcagggacccgtatgaggctaggggcggggctgaggctagacaagtgcggggctggcggtggggcctgggcttggtggggcgaggctggggccaggggcgtggtcatccccggggaagggcgggactggggctaggggcgtggtcatgtctggggaagggcggagctgggctgggatgggagtgggaccagcacttcgcaggtggttgggaaggggtcagactatgctgagtggagccggagctcgttagggtacctgcagggcggggcgcgcgtggccagagcgagaaagggagtggagctgcgggcgtggcccgggtaggaggggcagggctcacgctgggctgggaaaggggactgacgccgctctgggtggaacccgagctcggtggggtgtggccagtgctctgtgggggtggggctgaggctgggggcgtggcaggcacacgtgggggctgggccaggcccaccaacacctgctgacccttgactctgcgcagcttcccgagccgctcatctccttccgcctctaccacgagctcgtagggctggccaaggacagcctgaaggcagaggccgaggccaaggcggcgtcccggggccggcaggacggctcggagagcgaggcagtggcggtggccctggcaggtcggctgcgggagctcctgcgggacctgccgcctgagaaccgggcctcgctgcagtacctgctgcgtcacctacgcaggtgagtcccggcatatggagtggagggcgcggggtcccgggagccgctcagcacctggcccctgcccaccccgcaggatcgtggaggtggagcaggacaacaagatgacccccgggaacctgggcatcgtgttcgggcccacgctgcttcggccacggcccaccgaggccaccgtgtccctctcctccctggtggattatccccatcaggcccgcgtcatcgagactctcatcgtccactacggcctggtcttcgaggaggagccggaggagacccccgggggccaggtgagggtgtgggcctgaccggggctggccactcggggcttggggagcagggggcgctgctggggacagtcgttgtcggatgaagcccaaggaaccacagggagataatttggtttggacagggctgttcgggaggccactgtctttttgtgtcttttatgcaaaaaactcagcgaggtctgcattgaatctggcagaggtgcaaaggctctgcggccgcccctccactctcccttggggctggccttgggcctcacccttcacccccagcttccttccccgtttcccatcccggtgctgcctgcagccacaagctccacgctggcccggtgtccacagcctgcccgagctgccactgcactccgccgcgaggtcaattccccgcttcagattttcttttctgggagttgtagtttcgctcctgctgcccaggctgaagtgcaatggggcgatctcagcccaccacaacctccgcttcccaggttcaagcgattctcctgcctcagtctcccgcgtagctgggactacaggcgccggccaccacacccggctaatttttgtatttttaacagagatggggtttcactttgttggccaggctggtctcgaactgctgacctcaagtgatccgcaccccccttggcctcctgaagtgctgggattacaggtgtgagccactgcacgcggcgtctcgtattctttcaatccatcttccctgggtgtttaggggctgcggtttctcgggtttgctcttggctgaggacagaccgcctgggcaacagcgggtgtcagtagctgttacgggctgtgtgggtgggtttgttaatttataacatggaaaatggagccccggcccctctatgacttccgttctgcacttgcaggacgagtcatccaaccagcgagctgaggtagtcgtccaggtgccgtacctggaggcgggcgaggcggtggtctacccgctgcaggaggcggcggcggacgggtgcagaggtgagtgtgtggctgcccgaacggccccaagggaggctggcgtgtgccacccatgggcgcaggtgccatgacctagttgtacacacgtggcagggtccacggtgctgcacattctgtggatttcgtctgccacggagaccacacctatgagctactcattcagtgtcctttaaccggctgcaaaaacaggcaaggcagtgccttttgaggtgcctaccccgcactcagaaaccagtaacgtgaacgtggggctgatgccttgtgaggctccaggtgcaccaggtcaggctaagtgcctttcctgcaggagcccgtttttctagagaagggcgtggggctgggagtttgacccacgtggggccagcaccacctgtcagaggcagctggccgagtgccgcatctagttatgggacacctgtgttgtctgtcttcacactgctgataaataaatacctgaggctgggcacggtggctcacgcctgtaatcctcgcactttgggaggacaaggcagatcacttgaggttaggagttcaagaccagcctgaccaacatggtgaaatcccatctctactaaaaatacaaaaattagacaggtgtggtggagggcacctgtaatcccagctactcaggaggctgaagcaggagaatcacttgaaccggggaggcagaggttgcactgagccaagatcatggcactgcactccagcccgggcaagagagagagactctgtctcaaaaagaaatacctgagactgggcaatttacaaaagaaagaggtttaatggagttacagttccatgtagctggggaggcctcacaatcatggcagaaagcaaagaggagcaagtcacatcttgcatggatggtggcaggcaaagggagagcttgtgtccggaaactccagtttttagaccatcagatcttgtgaaacccacgtactatcatgagaacagcccaggaaagacgcacctccaggattcaaccatcctccaccagctccctcccacaacacgtgggaattatgggagctacaagatgaggtttgggtggggacacagagccagaccctatcaacacctctctccttccgtttctccccttgtctctctctcctcctccccgccatgtctctccatctgtctgtccctccccttgtctctcctccatctctcctgtctctccccatctctcctgtctctccatctctctcccccctctcctgtctctccccatctctcctgtctgtccctccccttgtctctcctccatctctcctgtctgtctccccccgccatctgtctccctttcttagaatcccgagttgtgtccaacgattcggactcggacctagaggaggcctccgagctgctgtcctcatcggaggccagtgccctgggccacctcagcttcctggagcagcagcagagcgaggccagcctagaggtggcttctggcagccacagcggcagtgaggagcagctggaggccacagcccgggaggacggggacggggacgaggacggcccggcccagcagctctcaggattcaacaccaaccagtccaacaacgtgctgcaggccccactgccccccatgaggctccgtggcgggcggatgacactgggctcctgcagggaaaggcagccggaattcgtgtgagctggggtggggctgggaccacaggtggcttctctcttgcctgctcctgtccctccagcacgtcccctgcaccacggcatagcttaggtgcgccgtcctggggtcgctgccgagagcgcctggacttcgacgtcccaccagcgggcgcctcctcccagaggcttccaggagcacgagggccttgcggcacaggactgtgccctgtgctgtcccctgcaccccggctcagctgagctggggaacactgctgtcgtgtgaagtcacagtggccttgttggtgcccacagggctgtgtggatggaggaagctgtccctgcccagtgcatcccccaggtcatcacggggacgcaggaggcaggccctgccctgccctctcctcacaggtctgttgcagggactccagaaaccattctgggagccgtggatgggggcggagctggggtttggtgcagtttccagggtgcagtacagcagggcctgaatactggccctggactcccttttccagaacaccaggtgtggccacctggggctcaggtacacagtggggtctctcggaagccaccgtgtggttctttcacaggcacgtttattttgctgaaataaaaagtttttaatcgggtgttttctgtggcagctgcaagcttagaagattttctgtggcagctgcaagcttagaagaaggggccagggaggggacagagagagccccgtggcgtggccctgggcctccccctaggggagggatgtgtgaggaagggaaccccccgccacggggccccgcgaggtgggagcccgggtggtcttcaccacaggctgtgcagacggtcaggcatcgaatgacctcgtcacgtccacctgcagcccagggcagtccaggaaaacgttctcgatgacggacgtatcccccggctctaaggtttcgcacgtcagccccacatggccaccaagcactggaaacgtggcccatgcgcctgtggaactgcatttttttttttttttgagacagggtgtgaccctgtggcccaggctggagtacaggagcacaatcgtagctcactgcagcctcggcctcctgggctcaaatgatcctcccgcctcagcctcccaaagtgttgggattacaggtgtgagccactgtgcccaggtaatcttaaagttttttgtagaggtggggggtttctctgtgttgcccgggctggtcttttaactcctgagctcaagcgatcctccacttcctgggttcaagtgattctcctgccttagctcccaagtagctgggattacaggcatgcaccaccacgcccaggtaatttttgtattttttgcagtgatgggattttg[144 bp omitted]atgacacactctgtcccctccctcctccccagccctgggaacccccatccccacccaactccccagtcccgggaacccccatcctacttccagtctctgacgactctagtgacctcctaggagtgacatcagtgtttgtccctttgggtctggcttgctttggccaagacaattttgaaaaaagtacatttggagagaaggggaagcactgtccccatcacacacacagtccgcggcctggggatctggggaccctgctgcacagaacagtgggcgcgttacagaccaccgaccgcccgagggtgaattacatcttaataaagctactgtgagagaaccacgtggctaggttaaacttgggcaggcgaggccttctgaaatcagacagtaagcaaacggggaagtagagccagatcccaaacgtctgtaagaggaactggccgcaaaccacagctgcacaagccagagaacaactccacaccctcacgggaagggaagagacagacacgctcacgccttacccaggagcacgaagtgggagggcagggcgagggcctggggagacactgacccctgaagccagcgcgaggagggcacacctgccaggctgacctcgtgtgcttggggtgaggcaaggccacctgctggaaaccttgttagtcggcctggtttctgtatcaagcaaatttatttgctcaaaacatctttaccatttgaaaacacccaacctcctacaacaaccgagaactccagagctggcatctcgcaccctggtggcttgagcgcgtgcatggctgtgaatggagtaaagagccgaggccgggcgggggccgccacgcatcagggcccccgagggagggaagacgaggggtggaaggccgagggcccaggaggaagcagtggctggtgggagacccggaccccaaacccccaacagaggggacccagcgtggtctgggtgaagacccggcaccagctgcccccaggtgacctccctctgggggccttgttccttctgaggctgcatctcgcacaaatccacaggtgaatggggcgggctgggccacaggaagcctcaccccaggacgggagaacgtgggtggaggccacctgccttggggagtccagaggagcagcagccgtgagagctgtgggggccggattctggcagggcaggggcgtttgtcctgcagggatgggggtcgctgtgtgtccgcctctaggggctaggaaagggggagagtggtcacacgacaggggcagatccagtatgcccaggacagcacaacgcccaccgaacgtgacggggtgcgggaggcctggcaggaggcggcccaggccgcagtgcagaggccggacggctcccttgtgcccagcggtcacacaggcgtgggcagtagctctgacctcaaaggaaccgtgccagcgtcagaccaggccaagccccacccctgggctgagtgtgaagtggggcggcctgcaggacagcagctcgccatgaccagagtccaggggaagctgggaggctctcgccatgggcagaggctgtcccgctcctgagactccggccagtccctcccaaggtgcccactcagggaagggttggcctgaagctgtgcctcctctctcagctctggggtctctgggcaggtttctaaaccctcttctggaaagtcccgccgcacaactgccctgcaggtgaacgtctcctgcttctaaggtgggtcagcggcggagagacgcacgccccgcgtaccaggactctcccgtccaggcgcacagccccaagagctgcagcctacggtcgggtggggtctgggggtctgggggtgtcctgggagcgcctggtggcccagctgggctggtgctaggagggtcttgctgccggacaaagcaagaacagccctgcacaccgacggaggggacgacacccctgcctctgaccccacctcagtgcctgtccctcggccgtctcacctgtcaggcggtagctactgcaccagccggtaggtgatgtacctgccagccgtctcactgggccggatgatcttcaccacctgcagagacagagagcaggggctgcgaatgcttgaggggtctcactgcagtcaccagacagcaggcgggcagcacacgggctggggatggccggcaggggtccgagatggctgaccctgggctgtgggacccgctccctgggaacctgggtcacgctcttctctgggcccagtggccctggctttaagagggggatattgggggtgtggtctcgaggtcccctccaggccctggatcaagggggaggggctgtcggggagggacagaagcccccttctccgagtggtcagctcagagcagccccagggccccttctccccacagggctcacctgcccacgctttatcccaaagtagcgcgccacagggtcccccgcctggatcctgggcagctggttctctcggagcttactgcgaagcaccgtcaggaaaatgccagacagggccgttgggggggcaggggtgtgtgtggggggggaacgcggaagtctcgagggacagggaggggcggggccggtggggctggaaaggatactatcgggccagcagctctgtcacctcctccttggtcatgacgacgtgctcagggactagctgccgagagaggaagccaccaggcatcaccaagggctggtgagaccccacgtggctcccaggtgccaccacagcccctgcgccttcagacggacaagagccctgaaccccaccccgatccccggcactcagggagcccacccaccccaccctggctccacaggcgggggacggagtcacagctcctggggcttctgaggcagacgggctgggcacagccacctcctgctgggactcctcctgtcccagcactagggtccctccacactcccagcagtcccgattctacaggctggggtgggcccgggatctgcatttttttttttttttttttttttgagatggagtcttgctctgtctcccaggctggagtgcagtggcacaatctc[210 bp omitted]ggttcggctgctgcaggcccagggccaccctttgagaaccctgtcctccatgcactaataggaacacctgccctgggccccagatcccacatcttcctggccacccacaaacgctgcatctctgccggccccacgcaggcgggattccgcggcgcgcgcccacctcgtgctccgtgatgttgatgagcagctcctgctgcagaaactgctccaggatgtacttgggggccatgtcgaccagggactggaagagagcggctctaaggcacggcccggaggggcccagacaaccccaaccccatttcctgcctcaagctacctggggcttactcgtgtgccccaacaacacacccacgtcgtgaatcagaaaaccccaccgccagcccaggagccttcaacagcccgcccctccccagcctctctgctcatcgagagcctcatccagcagtgaagtggccgtggaaactcggatgtgtttccatccatcacacgcttccaggggcggccctcagagctggcagggcgacctcttccccatacaggggtgctgctctgtgtggctgcgtgaaccccacagctggtgggccagggactaaactgctctgctgactgcccgtcacagcacagcagcctggctccagagtgtccgacagacagacggggaacacggataggcccctggaggaccccgtgccgggcctcctctgcaagtccccctggacatcagctcaggataaagaacctccggctcctggaatctgcaccaggccgagggctggagcccacaggagctggcgagaggcacagtgccctccgccctgacgcccctcctgagagctgggggaggacggcggctgcctggggtggggcccatggacgcggtgggagggaggcggtcggggcttgccggacatcccggccacatcctccagggcaccctggctggcctggcccaaagcccaaggcacgtgggccgcctgtgggtactgcttgcgggaggaggctggggagggggagaggctggcggggtggggcaggggtgcccacctgcttggcggagggtgtcatgccctgctgcaccacgatgagagcccgtgtgatgttctcctcctgcatgcgctggcagtacaccttgatggtcttgatgcccaccttgggctcctctgcagacagagagtgtgctggcctgcacgagcctgggccctcgtggccctcgcccacccagagcccagagcacccaggttccagccccattccacacaggtgtctctcctgctcgggcctcggcttccgcgtttgcaaaacgaggcctgagttgcaggatcccaggacaggggaagagagggctgaaacctctcattcacccggagacagggacagggggctgacacccctcagtcacccagagaccagggagaagcagagaccttcgactctgagaggctcccaccctgggcagttctggggaggcgggtgactcagcaccaacctctccaacaagcagacctcacaccccaggacgctctctttaagaagcatcacctgaggccgggtgcggtggctcacacctgtaatcctagcactttgggaggctgaggcaggtggatcacttgaagtcaacagttctaaaccggcctggccaacatggtgaaacccggtctctattaacaatacaggatgggcgcggtggctcgcacctgtaatcccagcactttgggaggtcaaggtgggcagatcacgatgtcaggagatcgagaccaccctggctaacaaggtgaaatcccgtttctactaaaaatacaaaaaa[131 bp omitted]gtctcaaaaaaattaattaattaattaataaacaatacaaaaagaaaaagtagccaggtgagatggtgtatgcctgtaaacctagctttttgggaggctgaggtggaaggattgtttgaacctgggaggtggaggttgcagtgagctgagattgcgccactgcacactccagcctgggt[148 bp omitted]acctcatctctactaaaatgcaaagaaaaactagccaggcgtggtggtgggtgcctgtaatctcagctactcaagctgaggcaggagaatcgcttgaactcaggaggtggaggctgcagcaagccgagatggcaccactgcactccagcctgggcgacagattgagactctttttcaaaaaacaaaaacaaaaaaaaaacaaaaaaacccagcagcgtcaccaggtccggttggcagacgtgctccgtcaccccactgattaattctgggcgtggggctgcgcccctaaggcgcttgcaatcccccaaccgctgagggctttagagccatactagggaggcagacaggtgcggagacttccgcaaagcaggtgctgaaaccgagggtcccaggggtcctgggaaaagaggcccgagcacaagctcgagggacgagtaccggacgctgacaggggagagggggcatggggtgcggaggaatgggctggggcgggcaggggccgcagctcacaaggaggctgcgctgacccagacggggcctcctgggccaggccaagaagctggaagtgcacccaacggccaggatgggggagccaagggacactagggcaaaggacatggggggctgggggtgagtggggaggcccttgtgactctcctcgttggcaggaagagagaaggggactgagagggaaactagaaagaagctgagcatgagaggggtcagagatcaacggcatcacccacagcaaggaaggggaggggagttttcctcccagactgggcagagagacaaatgctgggcaccaggcgagtgggggtgggtgctagcgaccggctcctcggcaggtgctctggtggcttcaccggaactcccccgggacccgctgctcacctggaaagaacacaaacatctggtcggtggggtcatcgttgtgggccaccagcacggtgaggtccgtgcgccgcggccgcccctcactcggcttgtccccagattgggctttgaactcctccagggtctggtcaagctcgtcctgggtcaccagatagccacggtcgtggcacagctgcagagagaaagaaccagctgaccccagggcagagagaggaaggcggccaaagctcgtgacccggaagtcagacctgcggctgctgcagaggacagaggtgaacagcaaacgggatgaacactcactgtgtgctccatgacagccaccccggcccccacagcctcacaccacaggatgggaccagtatgatcctgagaggctcccagagatgtccagccttgaccaagaccgtctgtccacccagcctcacagaaacctggcagggagcaaagccctccaaaccactttgcagagctaccctaaaggcagggacaaaggcggggcgcggaggctcacgcccgtgatcccagtacttagggaggctgaggcaggagggttgctggaggccagttcaaggatgcagtgagctatgattgcaccactgcactgcagcctgggcgacagaatgaaaccctatctcttaaaaaaaaaaaatgacagggaccgaaacagatgtgacttcaggctgacaatgtttgaggatcggagaaagaagaatcaggctgcggggggcttcgctgaggacaagggcaaagggtgggaagcaagacaaagcaaaagctctcaaacggccccaatggctgaggcaataccctgaaccgcaggtcctcaggcctgtgcccggcttccaaaccggactcgacccagtggcctccatctgccccagaccccaaggcacgggttccgagctccacgtccccatcgaaagccccagctcgcccgctgcttcccaaccaccaactctgccagcctcggatgctgaagactccatggggttcaggacgcaaggacaaatagcgacgctgaatcacagagaagggcagagtctgggggcgccccccgtccccattcgcggcttcctcctcctctcgccgccacgcgcgccgcaccagcccaagccgcccacccacccctaagcaccgcacccagacgtctcgaaaccccctcccttccccgctgccggctcaggtcgggtccagcgcctggtatccccggcgacctctgggcctcccgtatcggcccggcccttcatcgctgctgctccgacgagagtacgaggagacgccgtgctcgaccccacctcgggcccctacacccgccgcccgcgcccccgcccccaacaccaggcgcggctcacctgcatgatggtcttgcggattttccagagccggtacgtctcctcctcgtcgtccatggcagcctccgccgccgccgccgctcgcaccccttctccgcgcgagaacccgcgcggactgcgcctgcgccgaatccgaatcaggccccctccgcctaaccccgccccgcgctggtctgtcgtcggcgaatgcctgaatgcagcaacgtctcggatcggcagcgccaagggcagcccgagccttacgagagcggcagttggctgagcgagtctctcgcctccgtagttctcgtgtgtctttggccgcacagcctctcgggagttgtagtttccgttcaactcccaccttggagcaacagtttagaatcccacgaggcgggggcgaagtgtgagcggggaaactgaggcctggatggggtcaaggggcagctcggctcctagggatggtctgggagcctagtgggaactctataaatatttgtgcatcaaactgtacagggtttcctccattggctcctggccaggtcagggttaattcccttgggcctcagtttccctacctgtgcaatggcaataaagtgtccctactttagacggttaactgagagtcttaggcatctctctaggtgcttattaagtcccctcacctctgtcctctcccctgagcgccaccagcctagcctgggtatctccccagcctagcctgggtatctccccaccccagactcttcctgtctttgcaaacctcctcacttccccaggttcacggagaaccccagcccaacacttcctgtgtgcaggctatcagtaacttattcagtgatgcattcgttaattcaacatttactcagcaacctacagtgatggtgaataaaacaggccaagtatcccttgcattcagataaagacaggatttagtaaaatataataaataacgtggccgggcgcggtggctcatgcctataatcccagcactttgggaggct[134 bp omitted]aaggcaggagaatctcgtgaacctgtaaggtggaggtttcagtgagccaagatcgtgccactgcactccagcctggacaacagagcaagactctgtctcaaaaataaaatgaaatgaaataaaataaaataaataacaacgttagaaagtgacaaagctacggaagaagaaagagcagggaggctaagtgacatggggagaatgggagaactgcagtatcacatggggaggtcagggaatacagtgaggatagattcaagcaaaaatcccattagcagtggtggctcatcactgtaatcccagcactttgggtggccgaggcaggcagagcatgagatcaggagttccagaccagcttggccaacatggtgaaaccctgtctctactaaaaatacaaaaattagccaggtttggtggtgggtgcctgtactcccagttactcgggaggctgaggcaggagaatcacttgaacccgggaggcggaggttgcagtgagccgagatcgcaccactgcactccagcctgggtgacagagcaagactccatcgagaaaaaaaaaaaaaaatcccattgggcgcgatagctcacacctgtaatcccagcactttgggaagctgagaggggaggatccctttgttgtagttttgtaatttttagttgtaagtcacggacttttttacactgatatttgagattctttttggggggctgtcaggggctactttttttttttttcctgacacggaatctcgctctgtcccccaggctggagtgcagtggcaggatctcggctcactgcaagctccacctcccgggttcacgccattcttctgcctc[211 bp omitted]cttttctttctcaccttgaggccaggagtttgagacaagcctaggcaacataggaagaccccatttcttttttgttgttgttgttgttttttgagaccgagtctcgctctgttgcccaggctggagtacagtggcataatctcagctcactgcagcctccgcctcctgggtttaaaggattctcctgccttggcctcccgagtagctgggattacaggcgtgagccaccacacctggctaatttttttgtatttttggtagagatggggtttcaccatgttagccaggctggtcttgaacttctgacctcagatcatctgcttgcctcggccttccgaagtgctgagattacaggcgtgagccaccgcacccggccaggaagaccccatttctacaaaaaaatttaaaaattagctgggcgtggtgggcgcacctgtagtcccagttactcgggaggctgaggtgggaagatctaggatcgcctgagcccagcggttgaggctgcagtgagctgtgattgcgccactgcactctagcctgggcgacagagcaagacactgtctccaaacaaacagaaaacaaacaaaaaccagaagaggagagggaggaaacctggggttgcctggggatagctgtatcaggcagacagcacagccaggatagaggctctggggctgtgcctcacctggagtgttcctggcagggaaggggcaggagggggtcagagggcaaggtggggcaggtcccatgaagccttgctggtcagggtaaaatgtctggagctgctgtgttgggaaatgactgttgggagccagggcagaagcaagagaccagggagggagtgggaaggcaaacttgccacaggttggggtggctccaactacggtaggggcaagcacagagcggggagggtgccacagggcgagaaaaagagggagaaagggaacaaagctgtccctgtgagcagtgaaaagaggggtgggagggtggaggcgtgtaggtcgaggtgagctctggagttcagggcaaggtctgggggatggacgtgcaggcagggtggccacgtggtgaagattagagccgggagcctggaccaggtcctgggagcagagcagagtccaggagagtaagtccagccctgctggtgttcagaagcccggagaaggaggggaggcagcagcaggaggggagggaggctcagcacagacactggagcagcccctgagctgcagacctggctgtgtgatctcaggcaggttactcaacctctctgtgcgtcccctctcccctcccttgtaaaacagggacaagaacagcacccacttcgtagggtaattggctaataattgcaatgtacacagagtggcgcctgacaccagcactgcataagtgttccctaaataggataaagggcaggaggttgccaggtctcctggaaacctggtgaggaaggtgtctaggggcagagggaagggagtggctatgtgatgccaccgccaagtcagcctgaggactgagcagggattcgcctagcagacattgcttgtgactcagggaagggggccagtgcctggcaggacggatttgagggaggagaggaattggagatgtggggcagatacatggggcggggagggtcaggagacggacaggcctcaggagtggattttatgacacaagaaagggcatctggagtaaagaccaagcagtgacctgcaaatctgggggcaggggtggactgagaggctgagcccaagccaggggcggcctggatgataacagcaaagccagaggcccggaagtcaggccatgatccacacacagggcaggtgaaaatgtaagatggtgcagccgctatagaaagcagtctggtcggccaggcgcagtggctcacgcctgtaatccaagcgctctgggaggctgaggcaggcggatcaactgaggtcaggggttcgagaccagcctggccaacatagtgaaaccccgtctctactgaaaataccaaaattagccgagcatggtggtgcaggcctgtaatcccagctacttgggaggccgagggaggagaatcgcttgaacctgggaggtggaggttgcagtgagccgagatcgtgccactgcactccagcttgggcaaaaagagtgaaactccatctcaaaaaaaaaaaaacaacaaacagtctggtggatcctcaaactgttacacaaagagtcaccatatgactcagcaattccactcctaggcatacacccaagagaaatgaaaacatacgcccacacaaacacttgtacggctttacaaactcaaaaagagaaaacagcccatagccgggcatggtggcgcatgcctgtaatctcagctattcaggaggctgagaaaggagaattgcttgaacctgggaggcggaggttgcagtgacctgagattgcgccactgcactccagcctgggtaacagagtgagactctgtctcaaaaaaaaaaaccccagatgtccatccacagatgaataaataaacacaatgtgatccctccacacactggaatatttctgagccatgaaaaggaatgatgaggctctgacacaggccacaatgtggatgtagcctgaggacctcatgctcagtgagagaagccaggcacaaaagaacacgcagtgtgtgatcccatttccatgaaatgtccaggacaggccaatccacagagacaggaggggatgtgtgtgtgccaggtcctaggggaggagatggagagtgaag[143 bp omitted]atggagaaaccctgtctctactaaaaatacaaaactaactgggtgtggtggcgcacgcctgtaatcccagctacttgggaggctgaggcaggagaatcgcttgaacctgggaggtggcagtgcagtgagctgagatcgtgccactgcactccagcctgggcaacaagagcgaaattctgtctcaagagaaaaaaaaaattctggaactagatagatagaggtgatggtctcataacattgtacacgtcctaaaaacactgaattgtacactttgaagtgttaaaatgttgaatttcatatgtattttgtttgaatttcaaaaactttttttttttttgagacagagtcttgctgtatccccccaggctggagtgcagtgacacgaactcggctcactgcaacctccacctccagggttcaagcaattctcctgcctcagcctcctgagtagctgggattacaggagcacggcaccactcccagctaatttttgtatttttagtggagatggggtttcccc[136 bp omitted]ttggccaggctggcctcaaactcctaacctcaggtgatccgcctgcttcggcctcccaaagtgctgggattacagatgtgagccaccgcacccagccaaaaagttttttttgagacggagagtctcgctctcttgcccaggctggagtgcggtggtgcgatctcggctcactgcaagctccgcctaccgggttcacaccattctcctgcctcagcctcccgagtagtagctgggactacaggagccctcgac[137 bp omitted]gcctggccaaaaagatcttaaaaaagaaatgaagccacaggacagcccctccccagtccttcctggagccaggggctgctctagaaagatatgtggcaacacagcttcctgcagggacactcaagaacttccgccctcacagggctggagccttgagaggtccccgagactccatttccccgttcgtgaaatggggacactctgggaaaagctgtgaagcccccagcacaaatctctcccagagcctggggccccgttctcagatccgaggtcgcgaccccgtgttttccccacttctgactttatcacaattggcaggaagtcaggaatgggatcaagtctctccgcggagctgtgggtgctgagctgtttttctggcaaccctgaaataaactcccatttcagtgcacatgtttgcaacaaacttaaggaaaacaacaccggcaaaattgcgaacagctgagccttcgcaagggcaagaacagagtcaccagtgtggccctgtcacccggcactgccagggcgggaggaaatgggggggtttcctgagaagtcagacaatgggagttgactccaagaactcagcctctaggggctgggcgggagcaaagccatgtgaacagacttatgcaagaccaggattcggccagccctgctcagggatccttgcttcactgcctctgccaccaaaccatccatgacgcctctgtgctgcatctggcaggcctgagtcgggggcagtggcgggggcaggctcatagcaccccccaagtcaacccggccctgagtctgtctctgaagaaatactcagtgcagggtcagaaaaggttaagacctt[132 bp omitted]gaaagcccgtatctactaaaaacacaaaaattagctgggcgtggtagcacatgcctgtaatcccagctactcaggagactgaggcaggagaatcacttgaacccggaaagcggaggttgcagtgagctgcgatggagccactgcactccagcctgggtgacagaccaagactcctcaaaaaaaaaaaaaaaaatccaaacccctgcctgtacaggggtcaaagtccaatcacggtgactcagttcccaagtatgagatgagtgtttctgttgccacatgtccaagccacgaagtgaaaaacagagttggaagccaagatgtggggcagtatgggctcgggtgtgcccataccttgtaatgttagaagtgtaagaaaaccctccagacttgtgtttattttctgagcacataccgcgcgtccctgcgtgggcagctgcccctgggggtgggagcccaggaaactccaggttctcagttaagtggtaactgtcttgatgactctcaggtctcagtgcccacattatacaagcggctcagcaaccagacccaggatggggagtcactgaccccctgcgcccatggcaggggtgagggtagggacacccccataagatggagctgtgatgagaagcaaacccaactcagtttggtttcatttacattaaaaaggcaaatcccttggccggatgcggtggctcacacctgtaatcccagcactctgggaggcct[136 bp omitted]gagtcaggagaatcgcttgaacccgggggctgggtggaggttgcagtgagctgagatagcgccactgcactccagcctgggcaaaagagcaaaaaaactgtgtctcggaaaaaaaaaaaaaaaaaaggcaaatcccggccgagcctttggctcacgcatgtgatcccagcacttttgggaagctgaggctggaggatcacttgaggtcagaagtttgagaccagcctaggcaacatagcgagacccccatgtctacaaaacaataattagccaggaatggtggatgagcctgttgtcccagctactcgggaagcagagacgggaggttcgcttgagcctgggaggtcgaggctgcagtgtgccctgatcgtgccactgcacgttagcctgggcaacacagcaagaccccgtgtcttaaaaaaaaaaaggtaaataagagttggggacacttttctgcgagttggagaaaccaaaccccctcgacgagtcttaagtagtattctcaggttgtctggcctgcggccgcgctgctgtcaaccagccggataactgcgctgcctcccgacgcgccgccagccaggccacggcctcctagacacaagcgagcatgcgcagtcgccaacaacaagtccgcacgtccggtcccgcccccccttccccgccttcttcccactccggcctcccattggctgacgtcggcgcgagcgctcaacaccgacgcgtctgaccaatgagcgctctggagggcgtggccgtgggaaaggaggcgcggaaagccgacgcgcgtccattggtcggctggacgaggggaggagccgctggctcccagccccgccgcgatgagcctcggccgcctttgccgcctactgaagccggcgctgctctgtggggctctggccgcgcctggcctggccgggaccatggtgagctagcgccgcggccgttgccggcccggtgaccgttggggcgggcgcgcgatccctgcctccgctcgccggcgtggggaaccctcaggctccagtgaccttggtggggggcgtctgggggctccccctccccacccccggccgggcacggacgcgggtgaccgtactgcgacgcgctccgcggccctccaggccgttgtaggcgcgcgggctggggtcggggaaggggaaggggttgttccacgcgcgcgggtcgtggtcggggaaggggccgtccaggccgttgcaggcgcgcgtgccggggccggggtcgggggtccaggcttgcagggggcggggtccgggacggctggggcggagctggaccgttgagggccacggcggggcgtctccgggccgagcggggctgctgcgcccgagcggttgggggcgcggagggctggaaatcccggatcacgcgcccccgggcgccgccccgcccccgcaccttggcctagcgcggtggcgtcacagtcgcgcagtcctgactacggcctccgggccctttgtccccgctagcggcgctcggggtgggggagccaggaggggcgggagacgggcgggtatgggccgcgcgggcgcaggctcccccgggcgccgcaggcagcggtgccagagccggggcaggcggcggccgcgagcccctcggcggcggaaggccccagcgtgcaggcgcaggagggcgcggcgccggcggaagaagccctgtccccgcagcttgcgaccggagatccacgaatgtcccaagtcccaggacccggtgcgcgcggggcccccacaccggctaatgtggcacattttggggttggaaccctctcccggcctccgggtctccggtaaaaccggaccagaagtacaagggggcgtgtgcgtttaaggaggaggagcgttcaggtcttcagggccgcagggcctcggtgtccccgccaccgacccgctcccgatcccttcctgcctcagggtcccgggctcagcctcccgtccacgctccctgctcagcttcctttgccttgcagtgcgcgtcccgggacgactggcgctgtgcgcgctccatgcacgagttttccgccaaggacatcgacgggcacatggttaacctggacaagtaccggtgggcgctcgcctggggtggggcgcggggtcgggccctgggagggggccgtgttcttctgcgctgacgccgccgatcctcgcaggggcttcgtgtgcatcgtcaccaacgtggcctcccagtgaggcaagaccgaagtaaactacactcagctcgtcgacctgcacgcccgatacgctgagtgtggtttgcggatcctggccttcccgtgtaaccagttcgggaagcaggtgggctgctgcgtccccggggcccgcagaggcgggtgggtgggggtcggggtgggctccagcctggagagggcctgggagtgtgcagggggcccggactgagggggtgccagcccccgactcactcacacaccttggccgccacaggagccagggagtaacgaagagatcaaagagttcgccgcgggctacaacgtcaaattcgatatgttcagcaagatctgcgtgaacggggacgacgcccacccgctgtggaagtggatgaagatccaacccaagggcaagggcatcctgggaaagtgcgtgacctctggggacagtacggctgctggggtgggggtgggggggctgctgggatgctcacacctccctggggcagaatggctcatggctcggggggcggttgcggggaggtgctgggactctcacatcgcgtggcctcctgggggtaagatggctcagggggacatagagggctgtggaggcagccagggatgcccacacctttgtggcctcctggggacaggatggctcgggggcctgtggggggctgttgggactctcacactgcatggcctcctggggtaagatggctctgggggggcttgggggcactgtggctgtggaggcagccggggaagctcacacccttgtggcctcctggagacaggacagcttggggactgtggggggctgctggggacgctcacgtccatgtgcttcttttccagtgccatcaagtggaacttcaccaaggtaagggggctgtggggggtaggggaccagcttcccctggccacagccgtggcccagatgggcagcggacaggaagggcagcctcagccccttgcaggggtggccccacagtttggacaccgtctctccacagttcctcatcgacaagaacggctgcgtggtgaagcgctacggacccatggaggagcccctggtaggtcctctctagggagcccgcttgaggctcgggggcttgggaggtagctgccctaacccagctttcctccccgacaggtgatagagaaggacctgccccactatttctagctccacaagtgtgtggccccgcccgagcccctgcccacgcccttggagccttccaccggcactcatgacggcctgcctgcaaacctgctggtggggcagacccgaaaatccagcgtgcaccccgccggaggaaggtcccatggcctgctgggcttggctcggcgcccccacccctggctaccttgtgggaataaacagacaaattagcctgctggatctttctgcgtaggggcttggggggcccttttgccaggggcccctccatgtcagggccagttgccgtcagctgccaggctgggggtgccatggaggtggcgtgttgttgccccctcttcctccaggctcggggggctgtgctggctgcagtgctggggtgcagtgagatctgggcccgttggacacccagccctggctcttaatccgtgcagccccacctgctgtgcacaggcagggcctggtgtagtgccgagtcttggaggagataattctaagtggctgtgcttcctggccccgggccttaactgttaggaggtggctactggggcctcccctggccaggaagcagaagtgcagaggcccgaggaacagcgtggccctggtgctggggatgggttgggcacccacaccggcccttggggcctcacctggctggggggtgtgggggtggctgggtggttactgtttgcacagagtccctccgtgagggctggggatggacaggccaggaggggctggtagagcagtaccagccaccgttcatgggacccgggggctgtctggacacggcctggctgcccacctgcacagctagagggactgcagcctgccagggtggctgatcccagctgcccccactgggggtctgtggaatggacggtccatggcacctgccccagacactgggttgagaggtctgtctctcccagccctcgtcccctctcatccacatggggccagcacaggcagtgggcagaaaggcctggtaaccaggagagcctggggggatgcccacacacccctgcccttccctccctgtcccacaggctgaggagcagactccgtgggaagtaggcaaaaggcacatatatttaaaaaagtcctttacatatgtacatcagaacttgctataaatacatagaaaccgcaggcgccaccctgccagctccgcggcctggggcctgggagaggtgagcgggcaataacttaggggtcagggaagggctgggggagggagaattgcatatattagcaggggtctgccccacggagcccccgagacgcggggccctgagcacctggggtttcctgagtttctagctcttgggaccacccggtttcacggatttcaagggtttgggcccactgagcccttgtgggtgcccagtcccagagcagccacccggagccccttcctacttgggaggagaggcacagagagggccctgccacgccccggcccccagctgtcctgagtgggccccgccagggctgaccaggtgggggcccgggtcgggcgctgaaggcactgcggccagggcctagggctcctctgagcagtggtcaggggaccttggccctgctccccaccgctgctcctaggggagaaacggtccctgtgtcttggggcatgtttcgcctaaaggcgtgtcagagaggagcctgggcgccggggaagggtgggctgaactggatcacgctctgccgctcgggaccaccgcccgccgcgccccccgcccccgcgccctcccccagcgcgccctcggagggcggccccgcgtgcagcgagcgcagcatgtcctccagcacctccttgaagttgatgtcgcagccctggtgcgcgagggccgcagggtcggcctgggcgtcgggggtgcccagcggcacgacgccggggccggcgtccagggacagcggcgccgggaaagagaagtgcgggggcggcgggaaggcctcggccggggggctgtaggtgaggtccagcacctctccggggccgcaaggcagcgccagcgggcgcggggcgggcggggcggggcagcccagggcgggcgcctgcctgcgcttcacgtccgcatccatcagccgcagctcctgcagcacccggcgcacgcagccctcggggatcttgatgcctgcgggcagagcgtcggggtcagggccggcgctgggggctcgggccttcccggggcgcccgccgcccactcacccacttgcttcttcctgtccttggtcttcagccgcacgatctgcaggtagctgctgctgctgacgtcggccatgacggcggcgatgcggccccacacgcgcagcagcgcgccgcacagcatgtagtggtgccgcagccgcagcccctgcaggcagtccttaccctcctgcgccagccggcagtgccggttcctgcggacgagacgggtcgtctcggctcaggcgggtcccaggggcccgcaggctccccaggtgccctgagatctcccgcctcctctcagggtctcgggagcccccgatccccgcctgggtcgccgccatctgccggtttccccctggtccccggcccgccctcaccaggcgctgtggctgcagtgcgtcagcgacaaagcgtagccactctcccagggctccttggcctcctccgcggtgacctagggacacagggccgcatgagcctgggcggggtcagggccggcaacccgagcgaaagctgcgcccggcggccgcctacccggtggaacttgcggcggaggctgtccagggcctccagctggctctgccggccgatgttgggcttgtacaccgtgaagaactggccgcggttctgctccgccagcaggcagctgggcttgttaccgcggacctgcggaggggggcgttgaggccgcgccccggtccgccccccgcgggccctcctctgggggggtaaccccgcccgaccccaccttgtaggagaggtagaagccgtcataggggcccgtcagcgccagcgacttggcaaaggcgtcctcccacttcaggccgcggtccacgctgatctgccacggcacggggtgggggggtgtgagtgtggtgggggcggggtgggcagagtgtgaggggctgtggggcttcctgctgaccttgtagaagaccacctgcccgtcctgcgggtgcccgggagccaggaacacctgctggctctcctcgtagatctcctcgataccgggagcaaggtctaggggggcgggtggagggtaagtggtgtccaggcctgggactgtgggctggggccagggtcagtcccgtagccggggcgcaccctagagacgaccccccgagagcacaggagagggtgtcctggatcctggcctgacctggcccagcgtggggatggtgcacgtgggccccaacctggcaaccgctcaggtcctaggtaaccccgagcaggctgtgggggatcgtgggagcctgggggccgctcaggtcctatgtaaccccgagcaggctgtgggggatcgtgggagcctgggggccgctcagatcctaggtaaccccaagcaggctgtgaggagattgtaggagcctgggggctgctcaggtgctgggtgaccccaagcaggctgtgggggatcgtgggagcctggttggctgcggcactgctcatgagtgaagtagccatggcccggacccgaccctcatctggacacagggaagtggtcctgatggacaggcctggccccatgaggctggaagcacaggctcgccggcctttcgttcacaacaatgtagcaggtgccccgtgaagcctggggatgagcatggtgggcagcgtgcaccagcctgggcaccttccagagacgtgcacggtgatcccacgagccctgtgcctgcatccgcccagtctcacccagtaccctcgctcacccaggatgcatggcgcttccacgagccccttgcccacctaggccctcgccgtgctcacccacaatgcacggtgttcccacgagccccgagcccacctgggatgcccggcgttcccacgagcccctcgcccacccgggatgcacggtgttcccacgagcccctcgcccacccgggatgcccggtgttcccacgagccccgagcccacccaggatgcatggcgttcccacgagccccgcacccacacccacccacaccacaccccggcacctgtgctcacccaggatgcccatgtcgtatttgccctcccgcttgtccatctcgatgaggtggtcgaaggtgtctgagaagtactggaacagggcgttctgcttgtgcacctccagccccaggatgcggttcaggaacttggtgatggaacagtctggtaggggagggagccaagcctcaggctgcgctgggaatccctctccctgctttgctcaccacccgaggccaaggttgcatgagatgagagacaggagcgcctctgggcctgggtgtggggcactcacccttctccacgtccaggcagccattccgggactcccggccaccaatgcccacagacagcaggccctgcttcatgtctgcggggagaggggcctcacatgctggtcttcccacccctgcccctccctcgaagcccctagctccttttccagagaccagcagctccctggggggctggggagcagctgcagcctagggccagggccagggccaggagcggagccttttgcctgacttacaggagtgagaacagcatgttcttggggagtaaacccaaaccccaggcccctcagctgccctggaaacccacccggcagctgctgggggccgccttggctccctttgccttcacagccctctctgtccgtgtgtggggaggggtcactcaacacacaaccggcctacaaagcctgctgccccagctgctctggagcccagtgctctgcaacccctgcccctcccaggaagacccccaccagcccagcttaccccggaagaaggtggggacccctccagggtatccctggggcacaggcactttgttctcagtctggctcaggatggtggtgaggacacagtgcagggcccgggtgccatactagggggagaaggtgactcggggaggaggcccagggaggaggctggctttccctggacccctgcctccccagaaccccaccctcccctaggcccctggaccctgccctcccctagactcctagaccccacctcccccagctctcagccacctcctccccgggggtcctagactgggtcctcccccagacccctggatgccacctccctgagcccctagaagcccccttcccccctgggggtcctagacccggccctcctccagaccactgagccccacgttctccagcccccatctaccccctcccccaggctcttagatccggccctccctagacccctgcccctgccccgccccccaaccctgccttccctgcagtaccttgttctcaaagttgtacttgctgaggtcacgggactccgtggcgcggcggtctccgtgggtcagggccccctgccaggggtggggaggccatcagttggtcacctggggtctggcctctagcaccccacaaagctttggagagccttcctgggcctgtccctggttctcagccccacccccacctgctcaccagactctccaggcgcttggccacgatggaggcgaaccggcgctccccggccagctccgagatgaggaagacatactctggcgcggagacctggttggaccggtgggtgcggcctgggggcagagctgctctcagggcccggccaggcgggggcggggccgagaccatgttgggggcggggccaggcagcgctgggggcggggccggactcaccgaactgctggatggcgcggtcggcgctccacggcagctccaaggtcatgtgcacgcggcgccgctggttctggacacggcggtcggcttggagggagacacccgagctggaggcctccgagatgatggccacgagctagggggaaagaaggggccgggacacggttggtgcaaggcccgccccagcgttgccgccacctcctcacccactaggcccccgctccaggtcaccaggacgtcccggggcagcgagaggcctgcggggcgcggacaccacccgccacacggccactcgcgcccgcacctggcacacacacactccagaagtgcgcgggtccacagtccccggggacccttgggcccctctgtgcctcttgggtcccgtgggccgcgcccagtgcactgcagccccgcaccttctcgccgctcatgaagcgctgcttctccctgaggttcacgtggtcgatggacagaccctgctctgcccgcgactcgaaggccaccgtcccgtcgggcctggacaccacgcggcctttcctgccggtcatctgcagccgagacagggacaaaaccggccgtcagtgttgtggcctcgcaggagtctggccacccgtgtctcagcttccctatgtcctacagtggtcatgggctcccagctgtgcacgggaggtgggggtgctgggaaagggagggcgggactgctggacccaggcgatgtgtgcctgtccaaggcctggtattatcagccagccggcgccacgaagtgaaaaagtgaagctgggcgggggcagggagtaggaggccgcagaaccaggcccaggggcttgtgtcctggccctgggcaccccaaggggtgcgttcaggcaacgatctaagcagaggcctgcgcaggccaggctgggggatctggggcttagagggatggggcaggccgtccacaggaggtcgtggcctcccgggccgagctggacagcacgctgctgccccagggctccccaaacgccccctcctcgcagggccgcggagacgcagagtgaccagcaggggccaccagagctgcacacagcctgcgtgaagccccacccactgcccatgccccgcccaccacactccagctgccacgtcccacccacctccgccacccgctgggggccgcccagctggtcgatgagctcgtccagggtgttgactggcagttcccggcccagccgccgcactttgtccagcagatcctgcttcagccgctccacccgctccaggaccccggggccatgcgggtctctctgcaggaggcacaggggtcctagggaggaggtggagggtcagggcaggacatgttggctgccttctagggcccacctaactcaaggctggcccctggagggcaaggacaaggggcccggggcaaccctgagggacggcagggtggcggggaagcccggcaccgtggcccaggactgcttttctgcacttgtctccctgagaccagctggggcgagactaagcctcctgtcgcggaccaaacactgtgacctcactgcctccacaggggtagggactgcccagccccaagccccagctctgcctctgaccagtggtataacccctgacctcccctctctgggcctcagtttcccccatctgtaaagtgggcaccatagcagcagctgggctcaggtgggctggactgagggctacaacctggggtgggtggtgaccgccaggaggccgggggagcctcaggctggaatcctgacccagaggtggctgctcagcctggactggaatcctgacccacaggtggctggccagcctgggcaagccctcaccccggtcgtcactggggagcccgactgcatcaacgatgacaacgtcgtcatccaccagggactcgggggaggagttgaagtcgctgtccaggccagggtccgactccgtgctgctgtcgtcactgatgcggatgacgcccgctgtctcgcacgccagccggggggctttggccccgcgtccccgaggtcgccctgcagggaaggacagggtcaccgagggccagaccgcagcaaggtggaggagcaggtggaggagacgcagcaggacagagcaaggccagtggtccgagctggggaggtccatccgagaaccccctgcctctgggcaagcagctcagctgttctccagggacgccctctagggaaccccgtgccctgtggccaggagggtacggtgtggggggccatattttatttatttattttcttttgagacggagtcttactctgtcgccaggctggagaacggtggcatctcactgcactctctgcctcctggattcaagcgattctcctgcctcagcctcctgagtaggtgggattacaggcgcccaccaccacgcctggctaatcttttgtattttagtagagatggggtttcaccatgttggccaggatggtgtcgatctcctgacctcgtgatccacctgcctcagcctcccaaagtgctgggattataggcgtgaaccaccacgcctggcttatttatttatttttgagatggagtttcactctgttgcccaggctggagtgcagtggtgcgatctcagctcactgcaacctccacctcccgggttcaagcaattcccctgcctcagcctcctgagcagctggtattacaagcatgcaccaccacacctggctaatttttctatttttagtagagatggagtttcaccatgttggccaggctggtctcaaactcctggcctcaggtgatttgcccgcctcagccttccaaagtgctgggattacaacaggcgtgacccactgcacctagccaatattttatttttattaatttttttgagacaagagttttttctgtcacccaagttggagtgcagtggcatgatctcggctcactgcaatctccacctctcaggttcaagcgattcccctgcctcagcctcccaagtagctgggattataggcgtccaccaccacgcccagctaatttttgtatttttagtaga[154 bp omitted]aggcctggccagtatggtggacacgcggggtgcctggggaggccacacaccagacttcgacaggcagctctgggcttccctgtgacagaagcctgggggttatcaatgggctccccaagggaccgtggagaccctgaaaacggaaggtgggaggggtctcgctcagcacccgcgtccgtgtcccgccccccgggtctcgctcggcacccacgtctgtgtccttcaggctgtctgttgcttcctcttccctaagcgttccatggcagggtccacgcaagacctgccactggcagcggagccttgagcctgcctggcacggacaggacctgcatttggctgagtggacgggggagtgggggaagcagggagcgaccagccagcccccggggggagaaagcagaggggcaggggtgggtggggccatggggggcagggcttacgtttccgcttgctgcccgctcctctgtcccgctttctcttggtggacggaaagtgcttctgaattagcgacaggaacacgcctctgaaagtgagacgcggagtttattctcacacgaggagctgaggccaggcggggttgctctccaggagctggacgcacccctgggtccctgtgggggtcccggacaggaccgggcctgggcagagggtctcctgtgtggagtgggctggggaggactgggggctgcctgtgagctctcctctggcctcctggtgtcacagggccacctcggccaccaggcttcccccgctctgaggaatgtggccggatatgatgatggctcccaggacaggggcagggggcagggtgaaggggtagctgggggcattggggagctccgacccccaggcaatggggggatctaggggggctgctgtgaccctcccggggcattctcaaccaacaggggagaggctggggcttcagacagctgggagggccagcccctaaaatccacagcccccttgttaaaacggcacagatgcaggaagcctccttctgagacccctggagaccatgtcccaaaccttccaggcccaccatgcctggggtccacctccaagcctctgctttagacctggagcagcggtgaaggcctctgtggctgaggctgggggcccagcaaagcccaccccagcacctcctgctgctggggccaaggggcagggtcaggccacaggtggccacagagaggggtggccatgagcgcaggaagcccacagtcctgtccccaccgtgacacttactcagcggccgagacgaagcagttgaggtgcccatcgttctcccccagcacctcccgcgtgcgcgcctcgcccgtggactgcagcccgatgaccacgcactgtgggacggcagaggactgtgagccaccagccctgctgtggggcctctgtggggccagaacctgccaggcctggggtgatggccacatccctcactctgctgctgtgctcgcctccccaggaggggccacggcccccctacaacacacactgctgggtgggggtctgccggctgcctgtctcgggatggtgagctgcccactgtgtggtcacactccgctgttctgacaccctggctggctctgattggaagacggacatccgggcgtctctcacccaccagggtgcagcccccgcccacgtctggggaggggccaggaaggacctggaagaagagcagcctccgcccctgcaggcccggccgccctcagccctcgaaggccgcagccgctcaccttgtctcgcgccagctcctctcgggccagctccaccagccggcgcaccttggctgcgatgcacagatacttgaagaagcgctggtgtgccgaccagaactggccccacagggacttgcgcgactccaggccgatccagtcggccgcctgctggaacacgttcagggcctcggcccactgcaatgacacgtcacaaggcgcccctgagctgtggctcctggctcccgacccgggccccggcccacctgccgccagccctgggcaaggcatccccacgccaggtggaatttagggcaggatgggggtgctgggggtgtgcactgtaagaggcactgcctctacctgtacggcaaaaacctgaaaaaccaaaacactcgtggtggggaagccgtgctgcaaactgcacagactccgcgcccgcggcaaacaggctcagctccttccaagaacacagggtgctcgcagccacgcctctcttgctttggaccagggtctcacccaggtgtgatcctgtccaggggacactgggcatgtctggggctggctgtggtggtcaggtttgggggctggtcccggcatgactgggtgggctgggttagggtggctgggactctggccacggatgctgctccataccccaaagtgctcaggacggccccaccccggagagcaacccggccctgggggttacgggagatgctggttgtgtcacctaaagaaacgagtgaagaggctgggtgtggtggctcacgcctgtaatcacagcactttgggaggctgaggcggtcagatcgcctgagctcaggagtttgagaccaaccagcctgaccaacatggagaaatcctgtctctaccaaaaatataaaattggccgggctggtggcacatgcctgtaaccccagctacgcgggaggctgaggcaggagaattgcttgaatctggtaggcggaggttgcggtgagccaagatcgtgccattgcactccagcctgggcaacaagagtggaaaccccgtctcaaaaaataaaaaaaaaaaaccatcgaacatacagggctgttgggcgtgagggggagaaaacaggacctgtccaaacatggagggaacgaccaagccacatggcccacagcaatgtggatgctgaacacggctaccaactgccagctgtgggccaggacctgggggcaaagggcttgggcaccacaggaaggggggcggtggtttggtcccatccctcgttatcacagccacataaaaaccccagtgatggccgggcacgtggctcacgcctgtcatcccagcactgtgggaggccgaggcgggcagatcacttgcggtcaggagtttgaaaccaacctggccaacatggagaaacaccgttctctaccaaaaaatacacaaaattagctgggtgtggaggcgggcacctgtaactccagctactcgagaggctgaggggggagaatcgcttaaacccaagaggcagaggttgcagtgaactgagatcacaccacagcactccagcctagatgacagcacgagactgtctcaaaaaaacaacaaaaaaaaaaccccaggacaggacagggcgggccgtcacctgatgacgcctgtggcatctgcaaggccacgggggagcaatttcacccgggaaacgcacaggggtccccgggtcgggtgcgcaggctcaccagcagggccgcgcggttgtagacgcactcgaaggctggggccagcgggatctcctcgatgcggaaggtgacgccggagaagctgagctggcgtgcgatgtacatgccgctgaccttcatgtccatggccacgatctccatggcgccaacgcccctgcggatggacacagcccccgtgagcacggccagagcccgtggggatggagccactcggagcgcgaggcagagccagtcgcagagagggcggggtcggcaggagcagagccctggcggccactgaggcagttggcagctgagcctggcggggacggggcaggaagggctgcggaggggctggcttccctgggagtgctgggcagcccgaggcagtgaaacgagcgacccacattcagcacctctgggtgctggggaagcacacgtggcagtgccaggccttgggctgatgggcctgaggcctcctccccaccccccgccgcccctccacgtgggtgagaagggcactcacctcttctcgatggcgtgcaggaactcctcaaagttccggaagggtgtgccctcgccccagatacccaagcggctcatgtagatcatgttccgaggctcagaggcacctgtggggggaagctgccgtcagctccccaacccgggagggcccagaggccgcgtcaggggacgactaagttgggaccacccgacgaggggccctgcggggttggagccatgggcctgaagagagccagcgtggccttgggacaggcgcagaggtgccccagtgtccgaggaggagcagggtgcagacggaggctgagtacgcgtgtgggataccccttcgcggggacagccaggcagaaagacgctgctgcgggtgggtcacgtgggatccgcaccgccccacctgtggcgctggcgtagaccacgcgggccaggggcagcttgttctgcaggtctagcacagccttgcccatcttggtggagccggcattcttggctttgtgacactcgtcgaacacgatctgaggcacacgtgggttaaggagtattctgaaggacgggggcgaccccaggagcccaggtcctgaccacccaagaccccaccttcctggtggggggcaaacgcctgtgcggctgagaactccacgagggaagcccaggtcggagtggcagccggctaccatggggggcgggcgggcaggcggcccccacacgaccattagatgggtgtggcctgggatggctcctcccagactctaaacaacacacaccgaggatggggcctccggcgaggaagggtgggatccctaaaccatgatatcgcaggacgttgccatcggaggaggatacctggaacctgttttcttttttgtttgtttttttgagacagggtcttgctctgtcacccacgctggagtgcagtgatacaatgtcagctcactgcaacctctgcctctcagattcaagtgattctcctgcttcagcctcccaaggagctgggactacaggtgtgtgccaccaccacaaccggctaatttttgtagttttggtagagacggggttggccgtttggttggccagataatctcaaactcctgacctcaagtgacctgcctgcctcagcctcccaaagtgctgggattacaggtgtgagccgtgcccagccctaattctttgtttttttttgagacgaagtctcgctctgtcactaggctggaatgcagcggcgcgatctcagctcactgcaacctccgactccctggttcaagcgattctcctgcctcagcctcctgagtagctgggattacaagtgtgcgccaccacgcccgggtaatttttgtattttcagtagagacggggtttcaccatattggtcaagacagtctggaactctttttttttttagatgagacacagtctcgctctgtcgcctgggctggagagcagtggggcaatctcggctcactgccacctctgcctcctgggttcaagcgattctcctgcctcagcctcccgggtagctgggattacaggtgcgcaccaccacgcccagctaacttttgtatttttagtacagacgtggtttcaccatgttgtccaggtggtctcgaactcctgacctcgtgattcgcctgcctcggcctcccaaagtgctgggattacaagcgtgagccactgcacccggccaggttcttaatattttaagacgaaagaaagccaagttccaggaaagcagtctgaggaaggaaaactgggagaatacaaattaaacggccggccctgccgccacgtagcagctcagcgaggtatgatctcagggttatcgctatttcgtagattgttgcacatagattgttcagccgggtgcgaagacaccagcagtctcccgttctgtttctggccagtctgaatgttctgtgtctcggcgttaactgaacagcaaagccatggccatgtcctgtgcatgaagtggatgctgcaggccaacgtccctcccttatctgagcctgtgctcccaacaccccaacacccaaggtgcaccctgcagggccgagcaccagggctgagcctggccaaggggtgccctgccgtgcctttgctgctaactgtcctgggtctcctgtgggggagcccctccgaaccgcagcctgccgacgagagccctgggatgctggggagtgaactgtgcccaccacactatcagctggggttggcaccttcctgacttggggagcagctcagtggccaccctctgcccacggcatcatggcaaacatcaggaccacatctatggtcactcatcccacttatcagaaccaagaaaccaagccggagccctgtggtgaatgatgatggtcacttgtgtggtacccacagggccagcctcccaggaccagaaaagtcttctatccggagtcctaaaccctgagcaaagctgggggctgggtggccacatccagggtagtgagctccagtggcctccagcccttccccagccccacccctccgctcctaccctctcccatcctgccctcctctcccctgactcccacccctcctctcccactcctccatcctccttttccctccgaccccctaatccagccctcccctcccgattgcccccagcaggatacgacgccctcgaaggcctccccacaccagtccaggatctgccggaggcgagtgcggtgctggccgccggcctggctctccccaatcagggcggagtaggtggcgaagaggacgccctctgaggtagtggtgtcaccgtacttgatctggggatgcacagaacaggtgtggaatggggccccggctcagcaggctctggacctgggtctccctatctgtaagggtgctgggcagagcctgccctggctgctggcccacccagctgagcagcccccactttgcagggcacggtccccaccttgccccctactttgccgagcacagcccctaccttgctgagcgcgtgcaccgcgatgcccgtggcttcgatgtcccgcaggtcgcgctccgcatcgtacttgaggtcgttggagacgctgaacctgcggggtgggggcgtcaggcgcgcccacccttccccctcgccccccgcttccgccccccacccccgctcccgccccctgccccaggcagggcctcaccacaatgctttcttccggccgcgcaggtggttctccaggatgactccggccaccgtccggcctttgcccacgccggccccatcgccgatgagaaagcccgcgcgctgcccgctggggagcaggacctcgtgttgctgttgccggagagcaggcgtcagggcctgggggtgctggcccggcccctccccaggggcctcgcggacacaggctgggctgggttggggacatgcggtcacctggcaggcgtaggtgatggcctctagctgcagggcagacagggccccgctgtccgagggcagggccagggtgtaggtgatgtctgggggtgggacgctggacagtgtgctggtctccaccacgcggtctgggtgctgcttcccgatcttggctggaggagcaaggacggagggcaaggtaaagggtatggccaaggggtgaccagggccggttatggcacgctgggcgggtctggggcgtggccagagctggcggggcagtttgggggcgtggccaggtcccgttgggcgggtcatgggcgtggccaggaatgcctgggtggaggagtggtcagggctggccgggtcgggggtgtggccgcggcctgctgggttggttgggggcgtggccagcggcttgcaggaggggcaaatgcataaaaatcctcccagtgcctctgaggttcctttccacttctcccctctgcgaaccccggttttgtataagcctggattgtagaacctgtccccgggctctccggccctccctgaagcttcacattccctctgtgggctgtgcgggcggtggtcacctgcagggtctcggtcccacaaaagggtttgaacctgtcccagggctgggtgcagccgggccactcacacttggacggcacgtagtcggcgtaggtctctgtgtgccccagctcctccgcctcctcctcctcagcctcgtcctcctcctctggctggctctgcacactctgctcctgcgtgcgtggcgggagctcagcggagactgcaggcctgagcggccgcgggcactgggctcccccaggggcaggggccaggctgaccatgggcagctgagtgacccaggggtgggagacggctctgtctgcccctgcagcaaggtgctcccccagggcctccatctcctcagctataaaatgggcactcccagcttctaggccagccaagcgctccccacaatggagatgcctgtgctgagccctctccttaggtcccatgagagggcaggggagggagctctcggctgggcccagctcacctggtagctgacgagaagcggggtgctgtgggagggcagaaagtcctcgaagcctgcaaacggcctgctgagctggaacagctggaaggggagcaggatgtcagcccgggccagacgggacaggtcacagctggtgggccctcgcagcctggccaccagagggaggctccccactgccccgtcctcgcctccccatcctcgctccccagggccctgggtcttgctctcctgctgttctcagggtgaccctggtgcctcccaagcctccccagtgggcacctccctggggcctaaggctcgctcctcctggccagcacctggctgccttctcactgatggccagtgtgcctgcctggagtgcccgggaggaaggtgcccggctagttctgacagacaacacagcttggtcccgcgggagctgccaggaaggctgtggacaggggtctgacaggagagacccactgtgtgccagccccatgcagtgcaggaggccctcgggggcctgggagacaaggggttgggagctccctgtcgagggggaagaggagacagaggcagtgggggcgggcgggcctgggccttgtccctcacccgatggctcccagcacacagggtgggtggcccagggcagccctgcactctccaagaacccccgtgggtgcagtccctgaggcccctcgagggcagcacctcctctgtgagagatggggcaaggatgcctgccactgtagtgaccagagaacacatcccactgcggccccaccctggggagaaggactgcccggagcctcatgcagattcaccagggtgggcagtgacactgtcctcggggagctgaccccaggccttggcagacaggtgtgctgggcctctggatgagtctgtggcccacccaggggtctccgaactgactgggcgtgtaaagcctgtgaacgggtgggtcggggggtggtgtggcccgtcgtcatgcccactgtccagacgccaacactgagacagtgtggaccccgggacggatggctgggggatggtagggtccaaactagggtctgtgtgattctggaatatatccactcttaaaaagcaaaaatcctaacagtaatacgagccataaaaaacgtaagcatggtcagggtacagtggctcacacccgtaaatcccagcactttgggaggccaaggcctcccagagtggaggtcaggatttcgagaccagcctggccagcatgctgaaaccccgtctctactaaagatacaaaaaaaaaaaaattagccaggtgtggtggtgggcgcctgtaatctcagctgatcaggaggctgaggcaggagaatcgcttaaacccaggaggcagaggttgcagtgagctgagatcacgccattgtactccagcctgggtgacagggcgagactccatctcaaaaaaaaaaaaaaaaaaaaagtgagcgtgggccgggcatggtggctcacgcctgtaatcccagcacttcgggaggccaagataggtggatcacctgaggttgggagttcaagaccagcctgaccaaaatggataaaccccatctctactaaaaatacaaaattagccaggcacgatggtacatgcctgtaatctcagctactagggaggctgaggaggcaggagaatctcttgaacctgggaggtggagggtgcagtgagctgagatcgcaccactgcactccagcctgggcgacaagagcgagagactctgtcttaaaaaaagaaaaaaaaaagtgtgaagaattggaaaggggagaatcccgccgggtgcgtggctcaggcctgtgggaggcagaggcagaacgggcgagatcttttggggccagggttccagaccagcctggacaacatgataaaatcctatctctacaaaaaatacaaaaattagccaggcgtggtgtcgtgtgtctatggacccagctactcgagaggctgaggcaggaggatcgctttaacccagaaggtcgaggctgaaatgggctgaggttgcgccaccacactccagcctgggcgacagagtgagatcccgtctcaaaataaataagtaaataaataaataagagcatctcttctagacccggtcccccccttgaactccaacgtcctgagacgggtgaggtttccgcccaagcctgcctgagcccgggccgggttctcggcagtgtgtgggagccaccaggctagtgatgctaatgaactgagtccacagcttctgcattttctaacactaggaacactcctgagggtttttaaagaaagtggaagcgtggcacaggaaggttagaaacctatactcagttgccctctccttttttttttaagttaacaaaacacaaaaaaacagacgccacgcaggttcctggaaggctgagtcaccattcccggtggggctggcgggcattgggtttcagatgccctcgtgccggccacagcaggccggtcaggccctggcttctttcctcacgccctgctgaggacctgggagctagctgggagggcacgggccccgggctgggtgaaatgctctgctgggcccttgtgccagagggaccaagcctgagccgcccaccatggctgcggggtgccctgatgcttcctgagccgcccaccgtgagccacccaccgtggctgcggggtgccctgatgcttcctgcctgggcccccaagcccgtgagttctgctgcccgggttgccccttcctgagggcccgggagagcggcctatgggtgtgagcccaccactgtgccgggagcgtgcggaggctggcatgggccctcaccggaaggcgctcagtcccagagacatgtccaacgtctgctcccaaagtctagaagcttctctcgtggacaggcccggattggggaagggacttgccaggcctggctcccagccatgcctccctcaccagacacctccactgagtcgcactggggcacggctagaggctaggcccgaagaacctgggggccctgctgccctacaacccctgctctaggcctggcccacccaggtccttcaggagcttcttggaggcaaaccccagcccctcagcccccacggacaatgtccagctccccaccctgggacaggatccaccaacctcgccctctcagctccccactagcggggacacggccactgctgacccaggcaccatggggctggatgccaccacaggtgctgttcctctgcctggacagccacattgcctgggcccgctgggcgctgcctctccagggggcccttcctgaccacgcttctctgtcccgtcaccttcctgtgcttctctagaccagggactccccgggtgcggtggacacggggcagggtccctctcaggtggggccataatgggcactgcagggcgctgggcagcatcctggccccccccaactccatgccaggagcaccgcccagatgtggtagccacagatgtcctggacgtcgccttctcctattcaggacacaagaggaccctcaactaaccacctcatccatggccacagatggcgccgacagtgacaggcacagccattggcacgcagagtgggggagactgagacctcactggaccgtgtgggtcccgggctggggaggccacgctggtgggtcggggctggctgggggcaccgggcgcactgaccttatcgtgggtggagggggcagggttatcgtcccagatggtggacacctggttgaggctgtcagccggcaggaagtcgggcgtgtccacgatgtccgacagggagtccacggacgaggagaagatggagatgttggagaagtcctcaaaataggaggagtcctggaagacaaggccaggcccggtgagggtggtacgggagacaccaaggcccctccacgcactggagcacgtggggatgggagacaccacggccctccacacactggagcatgtgggaatgggagacaccacggccctcccaggttcaagcaattctcctgcctcatcctcccaagtagcagggattacaggtgtgcgccaccatgcccagctaatttttttgtatttttactagggacggggtttcaccatgttggccagcctggttttgaactcctgacctcaagtgatctgcctgcttcggcatccaaaagtgttgggattacaggcgtgagccaccatgtgacagagcgagagagtgagactccgtctcaaaaaagaaaaaaataaacaagcaatgggtgagaaacaccaaccctcagggccacgcaggacggcgtctgacttctgcagcacctgaagggcagcaatgctgcaggaactctgagcagctcgggtctggggtgagcctggtgccatgccctgtgccggaggcaggggcgggggcagccacgcccagaggtggggctcgccatggggatgacacacacacacgcgctgcccagtgaaggagatgtatgtacatcatttcatttttttttttttgagacggattcttacactgtcgcccgggctggagtgcaatggtgtgatctcgtctcactgcaccctctgcctcccaggtgcaagcgattctcctgcctc[224 bp omitted]caaggtggaagattgcttgagtccaggagttcaagattcgcctggacaatatggcaaaaccccatttctactaaaaatacaaaaattagctgggtgtggtggtgcatgcccgtagtcccagctactcggggggctgaggcgggaggatcacctgagcccagaggggtcaaggctgcagtgagctgttactgcacaactacattccagcctgggtgacagagcaagactctgtctcaaaaaaaaaaaaaatagactgggcatggtagctcacgcctgtaaccccagcactttgagaagccaaggtgggcagatcacctgaggtcaggagttcaagaccagcctgaccaatatggtaaaaccctgtctttactaaaaacacaaaaattagctgggcatggtggtgcgtgcctgtaatcctagctactcgagaggctggggcaggagaactgcttgaactcaggaggcagaggctgcagtgggctgagatcgtgccattgcactccagtctgggtgacacagggagactccatctcaagaaaaacaaacaaagaaaaaaaccaggcatgtcaagggggcgctgtctctccctggaagctgtgggttccgtccccctcaccttgctcagctttgcccactgcccaccctgtcagacccaagcacctgggcactgatcactagggaccttcaggaacctgcccccaaacagagacccccgggacagaggtgtccatgctgcccgcctgaggcccagagccaggtagggtgcagcaccccccaccccaggagggtaggagcagtccacctcccagagcctctggaggccccgatcggcagggttggggagcattcatcccactgaggcccacgagggccctccggacactgcccacccaggctgcagagggcctggtcacgctgacctgtggcccggaccctccgtggaagcatttcccgggcaaggtcaggggctcctgagttggtcaaggccccagccaggagcgggggtgagttgctatcgggcccagaaccgcccaggccttggtggtgcagggagcgcaggcagagcggaggagagctccccaaacccaaatgcgtgggtcacacggccagtccttccccggagctcagcgtggacagagggaagggacctcaggcagagacacctgccccacgccctcaccaggtgcccttggcccaagaagacaggacaacagggtcctcccgcccagggtcctccacccaaaactcctgccccagtctgaggaaacaccagcccgactactccagggcatccacaccacccgaccagccccaggaccgcccaacgcatctgaaacacgggcctctgagaaaccatcacagcccagaggggcctgaggagacgcctaaacaccacgtggggtcctgggcaggaaaggacatgggggaaactgaggcaatccaagcaaagcgtgggcctcaggagttaacggtggcgtacggatgttggttcatcagccgtgacagccacagacgggagatagaacagcagggagcccgggagtgggtgcacggggactctctgcactgtccctgcagcttttctgtcattctaaaacagtttgaaaagttaaagtcaagtcgggcaggggggagctcacgtctgctactcaggaggctgaggcaggaggatccgttgagcccaggtggtcgaggctgcagtgagctataattgcgccactgcacgccagcctgggagacagagcgagaccctatctcaaaaaaaaagttaaaagtcaagcagggcgtagtggctcatgcctgtaatcctactgttttagagccaaggtgaaagaatcacttgagcccaggagttcaagaccagcctgggcaacacagcaagactccatgtctacagaacgtttaaaaattagctgggcatggcagcatgtgcctgcagtcccagctactcaggaggctgaggtgggaggattgcttcaacccagttggtggaggttgcagggagccgagatcgtgccactgcacaccagcctgggtgacagagcaagtccctgtcacaaaaacaaataaataaaagtgaaagtctaataatgagggagtgcttgcagctttcaggcttcaagaacgcagcctcgaggccccgccctgctccccgtccggtccttcccagcacaggacaccccaccaggtgcatgagccctcgaagccttcacttctagcaggtgccctcagcgattagggacagagggagacggggttcccagggctggccctgttcacatgtgggaagctgaacagagccaggccagctccccccacagtggctccgtcctctgcccacatctggatttgactcctagcagccaccagctcacctcagagacagcctaagtcccacccgcgcctgtgtgtccctccacagcccctccaggccggcccaggctcctgcatccttcaccacatgacccacccaccctccagcctcagctcagcggacccagtgcctccccagggaaccgggcccctctgcagtctgtagtgagggcaagcaccaaggcccctcaagggtgacacttgcatccctccccgccagcccccagttctggggccccagggagggccggggctgcccgctgtggttcttgtctctgtagcatttcaggagccctgggctgaggtggggagctgggaggacctggctgggaggacctggctctgcccgcttcaaaagcagcagacacagctcctcctgccctgggcagccaactccagacctgactccagaactgactccagacctgatgtgctgccgctgccctgtgctccaggacccatggggagccacagagccacagggatttgccggcctgcgccaccagagccagccctgaccaggcccacccagcctccgctccctacaagagccccataagacacccagagcccctccacctgaggcttctccagaggaaagccacagctctgggtcctaccccaggggcagaaggagggggacgcagccctcccgacagccactgccactgtcactgagggcccccgtccgggcagggctgagcccgacccccccactccgctcgggtcccccagcctacgcacagggcgccgctcccagcccgaagtcttaaatctctgcctcggaaccttccggcagattccctctcactgccagaagagacggacggggcggggtggggatttttttagatcctggcggcctcggactctaggatgagatgccggctgctccggcagggggcccggccgtcctgaatggggtcccacctcccagacccctgcccccgagggcctcgcccgccccgggaagggagtgttaccttgttcagagcctcaaactgcagccacagctgcagctgggacatggtcccggcgctcggggggccaggggtcccccaggaagcgctgcccgggagcggctccctcatgaccgcggcagcagccccagcattgggtcggccggggcggacgggggcggctctccgcccggctgcatttgcatgtcggtttagtcaccgccgccggcgcctacttcctctaaggccggggctgactttcaggaaatgatgccggccccgtaagtcagggcaattaccggcagtgcgaggagaattactgtacggggcggatctcccacaggcgctgtcaacacgcaaccccacccgtgccccgccgcaggaccagccccctttggggcacccggcggacgtgcagaatgcccaggtgggcatgggcctcggtctccccagactgcagggagctgggttccgttccacggggaccagctgctgttcctggtgcccccaaaccacaggcagggaaactgcggccaagaccgcctcccttcacccagcaccccacgcatgccaagcgcacctcaggccctgctgcgcccccctggggctctccccaccccacccctgcaggctgaggtccccgagaagcccctgccgccgaagcaaagtcccctccctgctctttccctgctgtccgtgcccagggggttcagcgggccccgtggcctcccttgatctggggctggcggagggagagctgagcctgggcccctcctctccaggctctggccagacccggcctcggccccctgggcaggaacaagtggtagcgtcctgggaaaagaacgttctcgctttggtagaaaaccaagtgtcaatgatgcacttgctggggcaaccccgggccgcgagcccgcccgcggccacactcttgcccgcactgtgaggaccctggcgcatcacaggggcctagacaccgcggggcagacacctgatgggacctcacattgggccacaggcggtcattctcggtgtccttggaggagctggggaggccccagggccagagggggtgggaggacggccgggctgtggagaggacgggccccatctgcctgtactcagcgactgacggggcagaggccgcattgcccacgagaccgcggccgagaccgcgcaggtggccacggctcctcctctgtgaggggaggaagggcccggccctgtggccaggggccctgggaaagaaggaaaccgccccgagaggccaggggagcccgtggctgggccggagggctcgggacagttctgggcttgtaagactcccgccagggctctgaggggagagtgggaccagggggccctcaaaccctgtgcactccgccccctcgggctcaccctgttctagaccctgaggccctgtgccagccccactggggccccgcgaccaggcaccgcagcagcggaggctggtgcagactgtcgcccacaccccttgccacgacccatcacctcctggaggctgggcgacaacacgggtccgtgccgctggggcgaggggcccgcctgccaggcaccccgcccgccaatggaaaacaaccaatggggaagaaacccacggagccgctcaatccggcagccaatcacagccaccgctcaacctagcagccaatcacagccaccgctcaacccagtagccaatcacagccaccgctcaacccagcagccaatcacagccactcccagagacagctccacaccagctccacgcaaaaaacccacaaccacaagcgctgctgaggacgcggggcagtggcctgggaaccatcctgcagctcctcaaaagaggcgaatggggagtaacaacccagcagctgcactcccacgtgccatcaggaggacccacagctcacaaaagcctgaacctacagctcaggagtggacccacagcccacaggacccacagctcaagggtggactcacagctcacaggacccatagctcatgggtggacccacagctcataggcgcctggacccacagctcatgggtggacccacagcccataggacccacagctcacgggtggactcacagctcacgggtggactcacagctcacgggtggactcacagctcacaggtggacccacagctcacaggacctacagctcacgggtggactcacagctcataggcacctggacccacagctcacgggtggactcacagctcacaggacctacagctcacgggtggacccacagctcccgggtggaccctcagctcccaggtggacccacagctcatgacagcctggctcctgcagcgcagtcaccacggaggaacagggccagcacagtgaggccgtccacacactggaacacgacccagccatgaaaaggagcaaggctctgacccaagccacagcacggatgcaccttgaggacctcacactcagtgaaagacgccaaacacagaaggccacgcagtgtgtgaggccatttctatgaaatgtcctgtcctgaacaggaatccacacagacaggaaaagcattcaggttatcagggggtggggatgggctggggagtgacagctgatgggaacggggcttcctgtgggatgatggaatgttctggaactagacagaggtggtggttgcacaact[213 bp omitted]gaggcaggagaattgcttgaacccgggaggcagaggt[136 bp omitted]ggaagctgaggtgggcaaacagcttgagcccaggaagttcaagaccagcctgggcaacatagtgagatcccatctccacaaaaaatacaaaaaccagctgcgcatggtggcgggcacctgtggtcccagctgctcaggaggccatggcaggagaatcacttgagctagagaggtggaagctgcagtaagttatgatcacaccactgcactccagcctgggcaacagagcaaaatactgtctcaaataaataaagtggattttgtggtatgtgaattttgtctcagtttttaaaagacctggaaagcaacgaaacagaaagaacaagcacagactccgacttgctccccaggccccaatgtgacagcacagcccagggtccctggagcaggtcagactgaggataggggtgcgccgcctagggacctgctgggcactaccccacccacctccggcgccccgcgcccagtcctgggctcccgtggcccggtctctccctccgcctctgtccagggtgcacccctcactgaccagtcccgcagcaacgctgaccgagggctccgtgtaagcctggctgaatgcccgctgcctcagccctcacaggaaccctgccctgcattacagggagggaaacaggctacggggatgggaggggctcctcctggagggggctggggggcagacagaagaggcttccaggtggtcgtggggcacaggtggcacttcctagacactgccagtctttggtggctgggagaagggcccctcagcaggcctggtcactagagtgccccgtgcagagctgaactgtgtccccaaaatggtgtgatcatgtcctggcacctggaagctgtgtgtgtggccttatttgggaatccggtccttgcagatgtgagtggttaaaaaaaaaaaggccgcactggccgagcgggtgttctgtgcctggtgtcctcattcgaaggagacacagtcccggggaggaggccacgggacacagaagcagagatcccagccctgcggccacagccaggggatgcccggatcccccagatgctggaggggccggaaggagcgcggccctgtccgcaccttgactttggacttccaggctccagggctgggaggggacagagtcctggcctttgaagctgtgtgtgctgcttcctcacagcagccctgggaggctggcacggctccccaggaaactgggctcccttctgtcagggttccggccaggtgcctggtatgggccctggggccgccgcctcagtgtcttctggtgctgcagccgggcagggccgaaccctggcgcacagcttcctgctgagtctccctctctaaggctgtctgtgggcggctctgccggcccctcctgcacctgcccaggccctgggcggaggctcctcctcccgggggggctgtggcctcagcacagaccaggggacagaaggtggctcttcttggccttggctgggtgtgaaccaaagacttcctgtaagaaatccccctctccctctccctccttcgctccctcatctctctccctcttttttgcccaatgccagtaactgtgggggctccgtggtgccggatgggccgaggcatctgacccctgctgaaacgcatctgcagaacagtcaatgctgcctgcctccctgcctgaaagcagccagagtttgcaaagcgcttttctgagccgtgagctcatcctgagcttcccagaagcccccgggctgccaggcagagagtgttgttaccggacagctgcgttcccaatggtccctgcagccccatggggacccgggatggatgcccggcaggtggagaggtcctcacaggacaggtggtgggcaagggggcagcacctggggaatggggatgggctgtgggtgccgagagccccaggagcccagcagagacgcaagggatctgggtgatgtcaggaagggtgaaggagcacccccaccccaggaacaggcggcaagggatgggcgaggggcagtgaggcgagcaggacctggggaatgtcctgtgtaggggcacaggctggggagaggcttgggctggggtgcggttgggggaggctggcactggggtgcagtggaggagaggctcgggctggggtacagtggggggaggctcaggctggggtgaggctcgggccggggtgcggtggggggaggctcgggccggggtgcggtggggggaggctcgggccggggtgcggtggggggaggctcgggccggggtgcagtggggggaggctcgggccggggtgcggtgaggggaggctcgggccggggtgcggttgggggaggctggcactggggtgcagtggaggagaggctcgggctggggtgcagtggggggaggctcgggctgggggggtgaggctcgggctggggtgcggtggggggaggttcgggctggggtgcggtggggggaggctcgggctggggtgcggtggggggaggctcgggctggggtgcggtggggggaggctcgggctggggtgcagtggggggaggctcgggctggggtgcagtggggggaggctcgggctggggtgcagtggggggaggctcaggctggggggaggctcgggctggggtgcggtggggggaggctcgggctggggtgcggtggggggaggctcgggctggggtgcggtggggggaggctcgggctggggtgcagtggggggaggctcaggctggggggaggctcgggctggggtgcggtggggggaggttcgggctggggtgcggtggggggaggctcgggctggggtgcggtggggggaggctcgggctggggtgcggtggggggaggctcgggctggggtgcagtggggggaggctcgggctggggtgcagtggggggaggctcaggctggggggaggctcgggctggggtgcggtggggggaggctcgggctggggtgcggtggggggaggctcgggctggggtgcggtggggggaggctcgggctggggtgcggtggggggaggctcgggctggggtgcagtggggggaggctcaggctggggggaggctcgggctggggtgcggtggggggaggctcgggctggggtgtggtggggaggagaccagaagaggcaccaggggctgccctgggggacactcaccccacacagaaacaggtgccggagagcctgggggtggggccgcgaggctgggctgggcctggagcaggggacccacgggaggctctgggcacagagggtgggctgcagcagcaagggccccttatcctcgagcaggaacccaacaccccccagccagacccagtcatgcctggaacacacagacatggacctgcatatggacgctgctaacagcgattcacagctgctgtcaacccatacctactcctgggtatgagcccaagagaaacgaaaacgtgtccactgggaagtttgcacccgtgctcacggcggcacaactcacgacggccacgggtggaagcagcacaagcgtccatcacggacacacagacagacacagtggggccctccacgcctccatcacagacagacacagtggggccctccacgcctccatcacagacggacacagtggggccctccacgcctccatcacagacagacacagttggtcctccacgcctccatcacggacagacacagtggggccctccacgcctccatcacggacagacacagttggtcctccacgcctccatcacggacagacacagtggggccctccatgcgtccatcacggacagacacagtgggtcctccacgcgtccatcacagacagacacagtggggccctccacaggtccatcacggacacatggacagacacagtgggcccctccacgcgtccatcacagacagacactgtggtacctggtacctccacgcgtctatcatgaacaaaaacagtgggtcctccacgcgtccatcatgaacaaaaacagtgggtcctgcatgcgtccatcatggacaaacaaggtggggccccttcatgtgccggaacacggctcagccataatcaggagccaggctctgacccagccatagctcggatgtaccttgaggacatcacactcagtgagagacgccagaggcaggaggccatgcagcgtgtgatcccatttctatgaaatgtgcaggacaggccaagccacagagacgggaaggggatgcgtgggcgccggggcaggggagggatggggagtgacagctgacggggacagggcctcctctagggggacaatgatctggaattagaattacatggtgatggctgaacagctctggactttgtaacagccacagcatcgttcacttagaaatggggacttttctgtcacgtgaattgagtctcacgtgacagaaaaggggcggggcgtggtggctcgcacctgtaatcccgacactttgggaggcc[135 bp omitted]gaggcaggagaatcacttgaaccaggcaagcagaggctgcagtgagctgagatcgtgccattgcactccagcctgggagacagagtgagactttgtctcaaaaataaataaatatggtgcgcgtctgtaatcccagctactcaggaggctgagacaggagaatcgcttgaacctgggaggcagagtttgccatgagccgagatagatcacaccattgcactccagcttagacaccaaaagcaaaactccatctcaaaacaaaacaaaaaactagagaaaaacagagacagaaaagaaagaaagaaaataaagaagaaatgcaggccgggcgcggtggctcacgcctgtaatcccaatgctttgggaggctgaggtgggtggatcacaaggtcaggagattgagaccagcctggctaacacggtgaaaccccgtgtccactaaaaaacacaaaaaattagctgggcgtggtggtgggcacctgtagtcccagctactcgggaggctgaggc[135 bp omitted]cacagaaccacggttcacctgcacaccgcggcagggggccccaccaggacacacggggctgagccatcacccaccagggacattgagcctgatggcttcgcgccaacctggagacggaaggctgagcagaagtgaggggggcccttcctccgggccagggtggctggagggccgggcaaggcacacacgtgacaccgcgggagccccgcagcccacggtggatgccagcagcggcatcctggcgcagcgtgagccccaggggtgggggtgggggtggccagggagcaggcagagagcggggaaggggtgggggtcccacacagacccagccgtcagcaggagaaggcacacggaaaacagacggacgcagcagggatgcccgcaggcagctcccacgggcagaggctgctgaccccgccttgggcaggaccagcctctgctcagccttgggtcttcccccaggctgagagaaacaggaaatggatggtgaaggaaccccgtccccgccaagcggccaaagttaccagcatcagcacaacacgcgcaacgccaggcactccggtccacgccgcactgtacatggtgccgtctgagggattcctccatccagtcaggagacaaccccagacaaaaccaacggagaggcactctggagaagacacaccctggagaagacacaccctggagaagacgcaccccggagaagacgcaccccggagaagaggcgccccggagaagaggcactccggagaagacgcgccccggagaacacgcgccccggagaagaggcaccctggagaactgcctcttcgggggcaagcgcagaggctgctgactcccccggtccaacaagctcttagtttttgcaatttttttgtaatttttttttttttagacagagtcttgctctgtcacccaggctcgaatgcagtggcgcaatctcggctccctgcaacctctgcttcccgagttcaagtgattctcctgcctcagcctcctgagtagctgggattacaggtgcccgccaccatgctcagctaatttttgtatttgtagtagagacggggtttcgccacgttggccaggatggtctcaaactcctaagctcaggtgatctgcccgccttggccccccaaagtgctggggttacaagcttgagcactgcgcctgacctgtaaatctaatttttaattttgtatagagatgaggtctcattatgttgcccaggctggatccacgtgtccttcatggacaaacacagtgggcccctccacgcgtccatcacggacaaacacagtggggccctccacgcatccatcacggacacacggacaaacacaatgggcctcccactgggaactcccagactcaagcgatcctcatgcctcagtcaaatagatgggacccaaatactgggactacaggcttgcaccaccatgcccgactaattttttctattttttatacagatagggtctcactatgttgcgcaggctggtctcaaacccctgggctcaaacaatcctcccgccttggcctcccaaagtgctgggatcacaggcgtgagccaccgtgcccagtcctgactcaaacatgacctcctgcattcccaggggcagaatctcccaggcacagtggccctactcggagtctgtgaagtgaagaccaccaggtgagccatgatcaaccctcccctcaatgacctccctcacgatcaaccctcccctcaatggcctccctcctcatgatcaaccctcactcagtgacctccctcatgatcaaccctccctcaatgacctccctccccacgatcaatcctcactcaatgacctccctccccatgatcaaccctcactcaatgacctccctcatgatcaaccctccctcaatgacctccctcacgatcaaccctcccctcaatgacctccctccccacaatcaatctgcccctcagtggcctccctccccaggccgtgaaggctctccagcagaaccaacagtgctgcggagtccactggccccaggcactgcccgggtccacggctcatctgctttctcctattgctctggctgccaagaaactcagggctcaggtgtatcaatagt[134 bp omitted]gaggcagaagaatggctcacacttgggaggcagaggttgcagtgagccgagattgcaccactgcactccagcctgggtgacagagcgagactccgtctcaaaaaacaataggccaggtgcggtggctcatgcctgtaatcccagcactttgggagacgggcagatcacctgaggtcaggagttcgagaccatcctggccaacatggcgaaatcccatctctactaaaaatataaaaattagccgggcgtggtggtgggtgcctgtagtcccagctacttggtaggctgaggcaggagaatcgcttgaacccgccaggcagaggttgcagttacccaagatggcgccactacactccagcctgggcaagagtaagagtcggtctccagaaaaaaaagtcatgactagctgtctcgttatggcctgtggggttttacattcaccctcactcccagcccaggaacaggttctccctaccaatccctccaggtttatacaacagcaggaaacatttgcagggaatgcacacatgccacaggtcacacgatggctttgaacggtgcctccgtttcccctcgctcccgtgaaaagctactgtcaacctcatggctccaacaagctgaatatggtggctcacgcctgtaatccccatgctttggtaggctcaggcaggagaatcgcttgagcccagaagtttgagaccagcctaggcaacacagtgagacctcatttctacaaaacataaaaaattatctgggtgtggtggtgtgtccttatggtcccagctactggggaagctgaggtgggagcttgagcccaggaggtggaggctgcagtgagccgagattgcaccgctgcactccaggctgaacaacagagccagaccctgtctctaaaaataaaaattaaaaaaatatataaatgaaacacacacttatcctctcacagtctggagggcagaacttgtaacatcaagggtgggcagggcaggtccctcccgggggctccaggggaaaacccagttcctgcctttccagtgtccagaggcacccgcatcccttggcttggggccccttcttcccccttcacggccagagcgcaggctcttcccgtctctctctggctctcaccctcccgcctcctctcatgagggccctgtgaggacactgggtctccaggtcacccaggaagctctcccgtctcgggtccatcactcagtcccatctgcaggtccctgtgaggacactgggcctccaggtcacccaggaagctcttccgtcttgggtccatcactcagtcccatctgcaggtcccgtctgccatgagaggcgacacggcggcaggtcctggggatcaggacggggacgtcttggaggctgtaaccgtgtggccagcacatttcctcaggtctgagtcgggagcagaggcttccgtggctggctgggctgcgctggggggcacggcgcaaagggcctcgaacaccaggctcaggtctgggctccttcctggctccgcagaaccacgcggcccagcccacaggcctgggctgactcatacccgtcccgtcccacacttggcaccgcgggaccacgcatcccgtcccacactcgacaccacagaaccttgcggcccagcccacaggactgagctgacccacacccgtcccatcccacactcagcactgggggaccacgcggcccggcccacacttggcaccggggtcagacttcctccaaatgaagttctgctgctttaacagggagatttgggtccaagctgccccacatacggacgctggagcatgaggcggctgtaggcagggtgggcagggagccgggcgggcggtgctcacagaaccagcacagtggccccgagggctccgggctgaacagatgcagcagcaattgttcaggaggggaggagcaggagaattcatgagacagagatggagacggagacagagacagagacatggagagagacagagacagggagacagagacgcagagacatagagacatagagacagaggcagagagggaaacagacgaagacagagagggcgacagagacagaggcagagagggaaacagacgaagacagagagggcgacagagacagagagggaaacagacacagaggcagagagggagacaaagagacaggtggagagggagacagagagacagaggcagagacaaagagacagagacagagagggagacagagagacagagacagagagggagacagagagacaggggcagagacaagcagagagggagacacagacagagacagagagggagacagagagacagaggcggagatggagacagagacagagagacagagacagagagggagacagagacaaagagggagacagagacagagactgagagggagacagagagatggagcatagagggagacagagacagaggcagagagagagacagaggcagagaggaagacagaggcagagagggaggcagagacagagagggagataggcagagagagattgagagggagggagacagagagagagactaggagcag[138 bp omitted]catggagaaaccctgtctctaccaaaaaaaaaaaaaaaaaaattagccaggcatggtggtgcatgcctgtggtctcagctgctcgggaggctgaggcaggaaaatcgcttgaacctgggaagcggaggttgcagtgagccaagatcgtgccattgcactccagcctgagcaacaagagcaaaactctgtctcaaaaaaaaaaaaaaagaaagaaagaaaggaaagagagaaggaacacacagaaagaggcagagaaggggtgaaagagaagaagggggcggggcaaggacaggctgacccagggctggggctggtaggaaggcagtggcggtgaggaaggagccactgccatcagtcgcaccccgggctcctcccctgtgcgtcccctgaagggtggggcacagatgccagctctggacaggcgcctcccctgcctcagtttccttctgtgtccggctggcatggcgcagcagcttgccacaccttggccaggaccagatcacatgggggtccagggctactgcgggtgaggacagagcccctgtgcgcacctcgctgacctcagccccaagatgagcaggggcgcccccctcccctgaacacagctggtaggccaatttccaggccacacactgggggctacaggacaggaatccaccctcttcccgtcccagggcccgggagtctgaggccaaggtgtctcagggccttgctccctcccacagctctgacccacctcttccagccctggggctccaggagaaactgacctgtggccacaccgccccagccccggcctccagcgtggcgccagctcccaatctctcctgtctcttctgaggacccttgtgctggatttcagagctacctcatctcatcttgatccctacccaatgacatccaaaaagaccctactttccaggaaggtcccctcacagactctactggggaggcggacttgacggacgcggtcaccccagcacagactcagggtccggctggctttgccccgctctgctacggccctgagtggggaaaactgggcccggggtccacccggcgagctgtttgcagggcctgggtctgggtgagccctgggacctgaattggctccattctgctgcagccacacctgaccgcttctctctggatctggccggcttgcgcccatccccccaacagctctgaggcccaggcagatctcacatgcccattacacaggggaagcggaggcttgggggagctgagcaccaggtgaccctcgctccccggcaggccctggatgtggtccggcccagcagcagcccctggccccgggtcccacacggaggctgtggtatccgaaccgtcccagggaagccgatctctgtggcactgggtgctccagagctgccgagaggaagctggggcactgggaaccccttggggaaggctgtgagggtgggggtggggtccgcctgatgccgcagtgggaggctgtgagggtgggggtggggtccgcctgatgccgaagggggaggctgggagggtgggggtggggtccgcctgatgccgcagtgggaggctgggagcctccccgcgaccctggggagaaggaggtggaaagttctgttcctttggtatgtgagttccgttttcaggtggctgctaaggggttgggactccaatgtgcagggtgtctggacccgcctagagggagggccgtgggggcaaaggctgccaagggcatctctcccagcaccgccctccccgcaactccctctgtggcattgcccagatgctcgcagggaccccaagggctgggcggggctcactgctgacacgaagggccagtcactggctcttccccaaaaccaagccacatctctgggctcctactgccccaccgtaaaccctgcggccgaggggccaagccgaggtcactgagtcccaggcaggcctgagcgagagaggtcgcagggcagctggaggggcggcccagactccaccctgccccccacggcgcggtgagctcctggggctcctacctgagcaaagtcgcaggtctttggtggcaagctggaggcggtggccacgggggcatagctggtgtctgggcagggctggctgccgaggaaggaggcggagctcatgaacgggctggagggagatgggggggggggaggtgagatggggtgctcaacccactccctcagtaacacacctgcacccccatggccgcagccagaggcccctcgaggccccactggagtgtgcccagcccggcaggacccatggccccgctgcacatacagaggggcctccaggggggtggtggtcaagcctggggctgccctcccacccccactggacacagcccggcagagctcctacggaacagccgcctggtgggcggggggacatccagggccaccatcccgccctccccgctccatcagcaggactcggctaagggttcattctggcgattcagaaccccagcctggccatccctcccccacacacaggccccttgacccacacctcactcccgcctcgaaggaggagagcgctacgggcagaaacccaggatcaccgtcctccagggagggctcaggtcggaaccccccgccctgtcaccctgaggatggcaaaggacacagcaaggagaaggtcctgggggccccccgcccaggggcgcctctctccagatgatcccaggagtaaaatgtggctggcagggaggcttctctgcccttccccactccggcccccttggccagctcctgcgcttgggagaggggtggccgccgtccccagggcctccttccctcccgccaggctccccaggctctccctccagaagcttctctccagcagggctggcagcaggtccaggtctctgcccagtgggagccggaggccttgggttggaggcggccctgggcagacctgctcccagggcagggaccgcctgggggccactctcctcctgcatagaaaggtttgcaaacaccagcaggaaagaagcatccactccactcccgggccacaaacagctgctccacaatctcctggagtctcccaaggctctggctatacctgctcccaagccctttgcacagcctgctcgactgctcgcctggccaactcctaccccccctgcagaacccagcccagctgctgccctctgtgggaaaagtgcccttcccaccctccttcacccaccccagaaaacctcccgccccttcccaccctccttcaccccagaaaacctcccgccccttcccaccctccttcaccccagaaaacctcccgccccttcccaccctccttcaccccagaaaacctcccgccccttcccaccctccttcaccccagaaaacctcccgccccttcccaccctccttcaccccagaaaacctcccgccccttcccatcctccttcaccccagaaaacctcccgccccttcccaccctccttcaccccagaaaacctcccgccccttcccaccctccttcaccccagaaaacctcccgccccttcccaccctccttcaccccagaaaacctcccgccccttcccaccctccttcaccccagaaaacctcccgccccttcccaccctccttcaccccagaaaacctcccgccccttcccaccctccttcaccccagaaaacctcccgccccttcccaccctccttcaccccagaaaacctcccgccccttcccaccctccttcaccccagaaaacctcccgccccttcccaccctccttcaccccagaaaacctcccgccccttcccatcctggtgtcacctccacaggaggcccccctggcccatagcccacacctccccgccctctaccaagctgggctctcgaggagagggaagccatggatcacaaaacagcgttccacaaacaggggtctcagcctggacctggcccgtggggtggagccttccaggaccacgtgcacaccaccctccaaacccctcaacaagactttgggccctcgcgccctgcacccagaactccgtttgtaactgtgacttcagaatgagcaagcctgggggccaggcggggagggtcccggtactcaccggctgtcgctggagaaggcagggtatggcggcagcgagaaggtgttccagtaggggcagtgcagcatggcgctctagaagagacagcgggcatcagtgagtgggaagcagaggacctgcggtgcagcccggctaagccctccgggcagggtgacaggccgagaggctagggaggccccgcagtcagggtcccatcccgcccctgctggtatctcctggggagtcatttaactgccccgtgcctcagtttccccacctgcacaagaccccacccaaggcttgtggtgtggtctgaaggcactgaaccacccgcgtgaagggctcagcacaggtcttgctctaccagcagccccatgtgcaggcccgcagcccgggagtctgcatctcacacaagacctgggggtgccgctggccccgggaccctgcttggaggccccattctaggaggtggaggatcggaccgtttgcgtgagggagacgcgcacccgctgcctgtggtggagggtgggtgtcgggggctcctcgggcagggcctggggcaggcgagggcctcacaccacctccaggcccctcggacaagctgatgtgcccgggaagctcaggctgctgcgggacggggccctgacttctcagaagctgcacggggctggggtgcggggagcctgctttgggaaatggtgaccagtggcctggaggctcagcccgaggtcagtggaggcgtgagtggctccaggttggccgaatctctggtgggtctgactccaggccaggcttacccaacaccctcgccaggagccgatgtccccaccccatggttctctgggaaaacctcactatgcctgcccttgggaatgagagcggcttgaggcacacggcaggccccaaaacctgaggatggggagcacacggggcagcagcgggcccaagggcggcagcgggcccagggtcagcacctgcggcttcgggggcagggctgtggacacctcgtgccctgcagaatgggcacccctcagcagggcccccacctgcacagggccaacctcacctgcagcagagagaccctgccgtcacagacgcccccacagtcacgggggagaccctgccgtcacggatgcccccacggtcacgggggagaccctgccgtcacggacgcccccacggtcacgggggagaccctgccgtcacggacgcccccgtggtcatgggggagacaccaccagccgggggcatcatcctgcttatcccagcaggactgggggccacgctggcttccagaacagggttgggggttcgcctgcttccctgagtcccccagtgacctctcccaggcccacgtgagccctgctcctctatgaggccctgatgcaattccctggggctcggccacctctgcccctcattcacctcacactggctgggaaccagcccggatggccgggggccactttctgtacccgcaggtgctgggtgggggattccaggacccccgacagcctcgagataggcaaagccctcggggtgaccgctgccccgctcctccagcttttgcataaaataagtttatcagcaaaagcccacagctcctcccctgcacagaggccggcagcctgggcaccctgagctcctgcacccgtgagaagaccccgtgcaagtggcttgcaggaagccgggccaccagccacaggggctccagagcccgggtctcctgatccttcccctcctcctgcccttttgggaagagagaaagccagccctggagagaaacaggaacttcccaaggccatgtggcacatccggaacattctggaacagaactctgactccagaccaacccagcctcctcagatgagctggagtccgtctcaggcacacacggcgccttgggccaggctgggcagggccacggccagggaactgcagctgcaggaagggggcggggggcttggggtcgcagggcgggaggatccaggggtccctggctcacccaacatgctccacctgtacccaggccaggctaggggatgggacggggggaaagtcctgactgcctctatccccctagtctcctccctcccacagcccatggctcctctgagacctgccatccacacacacccgagtcccaccccacaggggtgccatgggcatggcaggccaatcagagtcttccctgggaccttctctggcagccagagggtgtggcttcacctttagatggcaggtcctagcacataattggtccagagatgggcacctgaccctgcccagacaatcagagcctgcctggtgattttctttcctttccttattttgagacggagtctcactctgtcacccaggctgaagtgcagtggcacgatcgtggctcactgcaacctccacctcccgagttcaagcgattctcctgtctcagcctcatgcgtagctgggattacaggcgcccgccaccacgcccagctaacttttgtatttttagtagagatgggatttcatcatgttggccaggccggtctcgaactcctgaccccaagcaatgtgcccacctcggcctcccagagtgctgggatttcaggcgtgaaccattgtgctggccggtgtatttttatttctaattgaatactctgggcactggaagaggctgggctgtgcgtgtgcgaactcagtcgaccctgcccagaggtgtccatgacgtacccgaatgtgacggaacccggaacagggagggtgggatgagcctcacacacgggatggggagcaaagccggttacgcgcacgggtgcgccccggcctgagccctgtggctggtgtccagtgcccccgccgggttccagccctgtcgcattccccgactgtcactgctaacaccttcctgctcccgctcggatccttgaagatggctcctctgtctccacatcccataattcgcttaattatttccccaccgtagagcctctggggagattccagtttcctgccactataaatagtgccgctctgtcttcccctccctcctggattagtccccagggtgtgtttccgagatagaattcttggatcggaacaagctcctggcgggtttcgggggatggagctgttccggtggggatgtggcttggccagtcccctttatggtggcccaggaggctgaccgacggccggtactcgagctccaccggggcagctgtgaggatccagcctcaaccccaagggactcaggaactagggagggggacaggaggggtctgggccgcaacagggaccctgctacgagaggggtaccctggccccagctcagagccccctctggacggtcagaacatggcaggaagctgcccaaagccctctgaggatggactgccgaggggtgtctgtgatgttcgccccacaggccaacctgggtgttgggctagggagtacccaggagaccctggagtcctggagcaggtcctgctgcttgata[138 bp omitted]acggggcaaaacctcatctctacgagaaaattttaaaaatctgccgggcatggtggcgcgtacctgtggtcccagctactcaggaggctgaggcaggagaatcactagcccaggaggcagaggctgcagtgagccgagatcgcaccactgcacttccagcctgggcaacagagtgaaaccgtgttttaaaaataacaaaacaaaataaaataaaatgaaataaaataaaaataaatatatatatacacgtttatatatttttaatttaaaaatttttttttttctttttgagccacagtttcgctctgtcacccaggctggagtgcagtggtgcaatctctgctcactgcagcctctgcctcccaggttcaagcgattctcctgcctcagcctcccaagtagctgggattacagacacctgccaccacgccaggctaattttttgtatttttagtagagacagggtttcaccatgttggccaggctggtctcaaactcctgacctcaagtgatctgcccgccttggcctctgaaagtgctaggattacaggcgtgagccaccgtgccaggcctatttttcatttttttgagatggagtctcactcttgtcgcccaggctagagttcagtggcgccgtctccactcactgcagcctctgcctcctagatttaagcaattctcctgcctcagcctcccgagtagctgggattacaggcgtccgccaccacgcctggctaagtttggtatctttagcagaagcgaggtttcactatgttggccaggctggtcttgaactcgggacctcaggtgatctgcccacctccacctcccaaagtgctgggattacaagcacgagccacttggccagaaacatattttttaagtaattccctcactgacaggttcctacaagtaaagttgagccccccctacagctgacggcgaaggaactggaagctctgcagcagggagaatctcctcaaatgtgcttcttgaaaagctggggccatgagtagcctcccattcacatccccatggggacccttctccagggcccacgggggcgggtggagccgggctccgggccaggaaggtcaggtggagatcacgccgcgtccactggggcagcattccgcacgacgtgaccccgggcactcggagcggggcaagtgcccgtggaccccgtcgggtgggccggggccgggggtggggctcacctgcaggggcggcgggctgtacaggaggctgcccgccggcgggggttcatgctgcgggtaatccctgtccatggcgggccccactgcaagcatcgggcggcaggcggggtggggtcctcggccgggcagcaggcggcgggactccaggacccggggccgccggggcgtctatctgggcttctcgctccgtggtggcggcggtggcggcagcatcatgatctgcagagggagacggggacgtcctgagagtccaacggtggtggagagtggtgctccccggccgcctctccctcgggcatgaccggtcccagcctgggctgcagctcctgctacctcctgggccggaaccaaaaggcgctccttcccctccccactcacccccacccgccatcagcagtgccacccaactcctttgtgctgcccacagcgcctttcctggcctccccggccccaactacaacgattaaggtgggcccgacagggctgcccaggtcacagggcagccgtaggaccaggcacccagactgtgagcagtggagctgcaggctgactcccccacatctggctttgtcagcagccggtgtgagactgtggagggagagtccaacccgggcccggcacccaggggagcccaggggacactggacccagccctgtccctcagaggcagcaggggctccacagtgaggtctcccaaggaggggggtcaggggccacgcagagctggaagagcacccagacctcgtttcaggctaatcacacaccagcatccccactgagaacgttcctgggctacagagccgagccccacaccatcagacgccagggacagctcccacgtgccccgcggcctctggcacacggccagacgcccgccaggctgagcccccaccaggccctacctggcgagtgcagggacccaggctggcccgtggtggcagggaaagctttccaggcgtccgcccagcatgctcactgccgagggcggcaggaaggggaggcggcggccactcccggccaagccctggagtgaagaaatctccgggacttccagtaattgccgtccagccacacgcaggcacttgtgcaatcccgtgggggagaggcacgtctctgcccggcgctccagagacagtggccgggcaacaggggctgggggtcgggactcctgtcccagagaccagatggaggtggtcaggcacagtgggggtcaccctgccaggccgtcccaactgtccgcggcctctgcctgctccctgcagtcaggacgctacaacccactgccaccagagctgggacccttggcagcccttccagctgcccacggggacctgcgacacccttgccagaacggccctttaggggaagggacaggcccgctgggatctggggtcttggccaatccttgtcaaagattctgggtcaggcaggatcaaagcctggctccaccttctgagttgaataacctcagacacccaagctcctccaagcctcggtatgttcctctgggagacaggttctctgggtagagcctgggaccccccgaccccggccccgtgtgctggtggccacaaacagctctgctgggcccaaggcagctgctgataccggggtccccatccaggggcccaccagtgctagggggtggcccaccccctgccttggggctcagcagcccctcccctgcagggactcccctcagctcctgtcagcaccccttcctgctgcaggttccatctcacggcagccacagccccagagctacgctgaccttttccacactcagggcgctcctcagctctgaggccacacagtcctgagctgatgggcagcagggcccaggccccacggtggacggagcttggggagggggcaccttgggcagctctggggcgaccccatgaccgtcctcggggtacaccatagctgagggacccctccagcagcaggggccctgagctcgcctgtgtccgagtcccctaggccagcacggtgctcctggcagctcctccctccctacggtctctgagccccccacgtctgtggacgccccttccaggcggcaaccccaggaggctcaggggaccgggttcttcaaggggagggcttcacacatggcatgtgacctggagtccatgccttggggacctggcagggtgtggagacctggaccgggaggggatgggggcaggagaacaatgcggacaccaggcacaaccaaccaagagtcagggcccaaaaccaggaggcggaggcggaggcggatcctcacacacggctgcttggcagtctgggattcctcaagaggctaacgctggagtcaccacaccaccgagcaattccacaccacacagaaacgtggccatgcacgtccacagcagcaccactcacaacagccacccgaggaagcagcccagtgtccacggataggcgagtggaccagcatgtggcgtggcccatccacgtgccagaacacgacacagccatgaacagcagcgaggccgacctaggccacagcgcagacgcaccttgaggacgtcacgctctgtgagagacgccaggcacagatgtgtgtgatcccactactatgcactgtccaggacgggcccatccagagacagaaggggatgcgtgggtgccgggctggggcgaccctgcacccggggcccatttccaagtccccccacaacccaacacttcaggctgtgcccactcctgagaacgcccaccctctgcaatcccccaggacccgccactcctgagaacgcccaccctctgcaatccctcaggacccacagccctgcctttccgcccactgccagccccccatcgcctcccaccctgtcctcggccatatctcacaacccctgctgccccgatccccaggccctcccgcagcccccagcccctagccctgcctgcagactcggtcctgtccgagggcccacgcccccaagggctggctcccaccccatggtcctgagccctccggacccttcccccattgactccgccgccgtttcttgcagcagctgtgaccacgccatgtctctggggcatccagctgccccaatccccaggataaaccctagtgggacactgggtggggtcttggggcctgagaacaccccaacgcagcctctgccacgcagccccggagacgctctccccacgcggccccggagaccctctgccacgcagccccggagacgctctccccacgcggccccggagaccctctccccacgcggccccggtgacacggcccaccccgagcctcagagccacgggccagccaaacgtccagcgggcagcagagcgtgtcccctgcctggttttatttttgggcgcgagtcccatgactggagggatgcgtggtgtgggggttgggggggcgggggtcacacggttcccaccttgggagggggcccgcgctttatcagcacgctgacacccagaggggatgtggcttccttctgaaatcaggtcttcaagggagtcgttgtaaaagagaacgatgaaggtgctggtggcccagacaggacaaccactgggaaggcagaacctcagacaggaccaagatccgggagaatccgaggaaccgggtaactgtgtccgcctcccagctctctcctgagtccgggtaactgcgtccgcctcccagctctctctcttgagtccgggtaactgcatctgcctcccagctctctctcctgagtccggataactgtccgcctcccagctctctcctgagtccggataactgtccgcctcccagctctctcctgagtccggataactgtccgcctcccagctctctcctgagtctgggtaactgcatctgcctcccgtctctctctcctgagtccgggtaactgcggccgcctcccgcctctttcttctgagcctgctgaagtccccgtcttcctggctggacgccccagggtctcaccccacgctgtgcagcaacagctcagcctcctgatgttcagaactggccactgtgcggaccctccccctgggggtccctgagcacctgtcgtgtggagccccttcgcgcgctccgccctcagacccgagccgtctgcagatggggagctgtgtcctcggagcccggttctcctgccgtcctctcgccgagcagggttgtgacccccgcactttcggatgtggacacggaggcccctaggtggagccttgacgtgacccccagagccagactcagcagctcaggccacgctgtgcccacgttcgcgacggcaaagcggagaccctgagaagacactggccgcagagccataaccgagaccacgggaggacccagggcgcacggcacaccccagagcgctccgcccaggcccgggttctggtctcctggcacacccggcagcatctcaaggcctgcgccagcaaaggcggacatggaggtctgaggaggaggcggcgaggcccgggcgagcgggcgcgaccgtggtgatggagcccggcagaggccaccgcacagtccctggaggccgcattacctcagccgaggttctccgggcaggcacaaggcgctccctgcgtcccaggacctgaagatggcaaggagcaggcccccgggtgtcccgggaaccccgcacagagccacggccataagacagagcggacttgcggcctccggtgacctcacagccgtgatggcctcctgcagctgtgaccgccgccccacagccgcgaccccacctgcagccgtgaccccacctgcagccgcgaccccacctgcagccgtgaccccacttgcagctgcaaccgccgccccacggccgtgaccccacctgcacccgcgaccccacctgcagccatgaccccacctgcagccatgaccccacctgcggctgcaaccgccgccccacagccgtgaccccacctgcagctatgaccaccgcacactggcctccagatgggctcaagacagggcaatcaccctctacctggcgggcgcacaactcgcatcctaggaccgggtgcagggggcgggggctggcgatttcacaaggctcagctaatatggggcagagagccctgcaagctcaggcacctgggcaggccccaactcggccgccaggaccgtctggtggggaggacactgcaggccgtctcaggtcctgacccctgcagacagagcgcttcgtccctcaacatggagcccggggcaagggaggcctgaagggctggagccaagggagggtcagcccagtgagagaccttggggggacgggggtagcaagagggggtagcaagggacagttggggacagcaggggacagtggggggacagggggcagcaggggacagttggggacagcaggggacagtggggggacagcaggggacagtgggacagcgggggaagagcaggggacagtggagggacagcaggggacagtggggggcagtggggggacagcgggggatggtggggggacagcagggggacagtagggaaacagtgggggatagtgggggggcagcggcggatgggacagcggggggacagcaagggacggggtgacaacagggagacagcggggagatggggacagcggggggcagtgggggacagtgggggaacagcggggggacagtggggggacaggaggggacacattcaagacatccgtgaggttcccctactcctgggccaaggtgcctgcctgagaggacttcgccccccacagagctgggcagtggcagaggagggggccagggaagggaggtgggtgagggagaccccagagtgtccggcgctgcccctgcccacgccagtgctgctctctgcagccatcagcctccgggtgcccccgcctgccccgccacgcggccacattcccgcaccaccctctcacacgttccaccccaggggcagcacccgccctctggctgtgggtgctggtgggcagcttgcgcctggcacctgtttgtgatgggggaagctgccccggcagcgaggctgagggagcgggaagggctgggcctggcagaggaagagcagccgctcacccacatccctgcagcccggctggggcccagcaagccgctcacggtccccaggccctcatgggcagccccccacccactgggtacatccaacttcatgcaccaagagcccatgaagaaaccactcccacacccctgcccaggcctcggggggtctgcggggcggcctcacaggaggcccagtattacaatggcggccgcctggctgcagtgagtgcctggtggacacccccgaagggcagtggggagacccgggggaggacgcacagagggtggctacagaacagaggcagctggctggagccaccgggggtctcgtccctgcagccttcgcctcctgggttccagtgatttttgtggacccactgggggtctcggctcactgcagccttcgcctcctgggttccagtgatttttgtgcctcagcttctggagtaactgggatgacaggcacccgccaccacggcccggataatttgcgtattttagtagagaaggggtttcaccatgttgcccaggctggtctcgaactgccgatttcaggtgatccgcccgcctcggcctcccaaagtgctggaattacaggcgtgagccaccaggcccggcccgaatggaaatcattttcatagtaacatgaatctctgtaactcactagactgtggccagggaaacctgtgggcagctctgccaggaccacaagggggcatttgctctggacggcccctcccagggtgggcagggcccgaggacggaaagaaagggtggagggtcctgaggtgcttcccagaaagctcaggctgctcctccagccaggcacagccagaccgggagcaccgggaggtgggggtgggggtgcctgagcactggaggctggaggtgggggtgggggtgcctgagcactggagatggaggtaggggtgcctgagtactgggggtgggggtgggggtgcctgagtactgggtactgggggtaggggtgcctgagcactgggggtgggggtgggggtgcctgagtactgggtactgggggtaggggtgcctgagcactgggggtgggggtgcctgagcactggagatggaggtaggggtgcctgagtactgggggtgggggtgcctgagtactgggtactgggggcgcctgagtactgagtactgggggtgggggtgcctgagtactgggtactgggggtgcctgagtactgggtactgggggtaggggtgcctgagtactgggggtggaggtgggggtgcctgagcactgggggtacctgagcactgggggtggagatgggggtgggggtgcctgagcactgggggggtggaagtgggggtgggagtgcctgagcactgggagctgggggtgggggtgccttcctgtctcaacacagctttacctcttgggcccgatgaagcgggtctcaggatgcccaggacccacattttaggaacggccacgtcatactacgctttctacctctcctcttgaaattttctaaaagttctcaagtctgctgccaaggttatcagaactgcgtagggagctgtgtgggtcacctgtgaggcccggagcctccctgacgcaggtggtgggtgtcatggctctgctgtcttgtgaaagagtcgtcagtcaggcggcagggccaggagggtgaaagccgatccactcccttccctggggagccgcgggggggggggggggggggttgggccaggcctgcggggaggagccgacatacagcttccccagcagccggccagacagacggacgtcctggcccaaggtgagcgggcacggccacagatggcgcctggggcctttgcaggcgccctcctggccccgaggctgtggggctcctttgtgggggacacagggctcagggaccactccacaccctagacgggagcagggatggggtcttttaaagttaaggttttattcttttttaaaataata[136 bp omitted]atccaggcgtggtggcgggtgcctgtagtcccagctactcgggaggccgaggcaggagaatggcgtgaacccgggaggcggcgcttgcagtgagccgagatcgggccactgcactccagcctgggtgaaagagcgagactccgtctcaaaaaaaaaaaaagaaacgctgttgggggcaggagcctggatctcaacccctgcaaggtggaaatctggcttcctctcacccatacgagcctgccagaggcaggaggctgacgccccggagggaccagctgacatcggccttgagggaccagacttctccaggccggcaaccttctcccagctttgtgaggtggagcccaacctccagaccaagagaggccttcctgaccttcaaccccatctccagagctccccagagctggtctagcccctcatctgacacacagagaaacggagaccaggaacctgacgctggtttccctagcccatgtgaggaccctgtagaccagctacatgcacacccagtccagccgccggacagcgttcagtgggaagagagcagaccatcgtccacccacattccagactccaactggcagaggggaggggacgttggggctgcagggccaccaatgtggacgggacagagccccagggacagcctgtgctggggacgtatgggggcaggatcagaccccacagtgcctgcgggccacaaggccaagacaggatctggtaagtgacgatttggaggctggtcctgaggtgcaagagggagtgccagggacagagagggcaccggggtgactacagtccctccagactcacatctacccgcacctgtgggtggggccttatttgcatacagggtctttgcacacgtggttggttacaatgaggatgctggagggggtggtctgtgtccctgttaacaactcatgtccttaagagaaaagaggaacgtggacacccacacatcgggagacggccgcatggagacggagcagaggctggagtgacgcggccgcagaccaagggcgcctggagccccggaagctgggaggggcaggaagggtcctcccctggagctactccttgacctcagcttcctgtggcctccaggacagggacaggctgctctaagccacccagtttgcagcactgctgcggccgccacgagaagctcgtccagggaggaggctgctccagccctgagccccacgcgactcccgtgagcacgaggactcgggtgccctggggtgaggcggcacgaggctgtctgtggatttccacagcatcccaggaggcgtctggaccgcagtggctccaggctgccaaccacgggcagaggccaccgctcccgagcttggaccctgccacgcgcaggcacaggccaggcggcgccggggaagcctgggggccccagaccggcccagcaccgcctgacatttctcaagcatgctgggggacggcccctcaatttaggatgaggacgaggtgggcccggcaggagggcaggagccggggtccagggcgagcaagttctccccgccccacgaggaacggcagtggccccggttgcctggaggtggaaggggcactgcagcctcaccgccccataccccaggagcccacgtgcttctctcacagggaaaggtgtactggccagactcagcgccctgaggacggggtcggaacccagcgcccaggaagctcccctccccccgaccaaggacctccctccaggtgggtcctctggaaactcaggcccgcggccatcacggcccctctcctgggagggctcaagggtgttggccgtgggggcttcacactgcaccccgatttcgagggaagcccctgcccatggcttccggggccttccggaggggccaaggggctggtgccatgggagggaaagttcccaagctcggagatggccaggagcaggaacagcttgagcgggtggccgaactgacagcttctcttgccaaacctcctgtcctgctccagcacaaagcctcccccgtgcacaggaacaggtgctaggacactgtggggacgtcccagatgccaggggcagtggagacaggaggaggaggaggaggaggaggaggaggaacaggaggaggaggaggaggaggaggaggagaaacaggtgctaggacactgtggggacgtcccagatgccaggggcagtggagacaggaggaggaggaggaggaacaggaggaggaggaggaggaggaggaggaacaggtgctaggacactgtggggtgtcccagatgccaggggcagtggagacaggaggaggaggaggaggaacaggaggaggaggaggaggaggaacaggaggaggaggaggaggaacaggaggaggaggaggaggaggaggaagaacaggaggaggaggaggaggaacaggaagaggaggaggaggaggaacaggtgctaggacactgtggggacatcccagatgccaggggcagtggagacaggaggaggaggaggaggagcaggaggagggaggaggaacaggaggaggaggaggaacaggaggaggaggaggaacaggaggaggaggaggaacaggaggaggaggaggaggaggcacaggaggaggaggaggaggcacaggaggaggaggaggaggaacaggaggaggaggaggaacaggaggaggaggaggaggaggcagcggcggcactgtgggtcttccacagggtgtgcccggaggaggtcaagactccactgccctgaagcaaacaaggcgtccagcccgagccagggtcacacgcccaacaggtaggatccagcaacccctgcgcagcagcccccgccatgcgagggaggacccggagttgagcgtggccctgcctgacatctgaccccgccgtcaggagctccaccaggtcagggctgctcagctgaccccacagccccaccaggcatggtcagcacggtgccgaatgcaggcctggaaagggaataaaggaggccctggggaggggccttggtgcttcatcccaagccaaccccgaaagtggaagccacagggccagggggacgtcgtggctgagatgcgagcagggtgccgggcacccccaaggcagcactgctgtccctgagaacagaaggaagtccaggcccagagtcagagccaagtggagtagtggtggttgctggcactcagtcccgtacccttggacagagcaagagtcccaagccaggaatgtgaggccgatgccttttaggaagaaaccacatctggggaaccagaccccagatcccagaacccagacctcagatcccagatcccagatctcagaccccagatcccagacttcagatccctagatcccagaccccagaccccagtacccagaccccagatctcagaccccagaccccagatctcagaccccagatctcagactccagaccccagatctcagaccccagaccccagatctcagaccccagatcccagaccccagaccccagatcccagaccccagatctcagacccccagaccccagatcccagatctcagaccccagatcccagaccccagaccccagatcccagaccccagatctcagacccccagaccccagatcccagatctcagaccccaaaccccagatcctagatctcagaccccagatcccagatcccagaccgcaagatcccagaccccagatcctagatcccagacctcagaccccagaccccagaccccagatcccagatcccagaccccagacccccagatctcagatcccagaccctagatcccaaaccccagatctcagaccccagatcccagacttcagatccccagaccccagatcccagacttcagatccccagaccccagatcccagacttcagatccccggatccccagatcccagacccgagattccagaccccagatcccagaccccagcccagagggaggcccggtgagggagtggaaaggagattccacgacacaaatgcttatgcggaaacagcctccaggccgggctgcggggctccaaagcagggtccccatgctccgagcgggcctcactgctacctggcggttaaaggcctgtccgcctggacagggtggtgcggctttctgtggcagccaagcagcttccacgcggcttctgctgctgtgaggagcccgctcgggtcttgtgtttattttcagtcttttggggccagtgcggtggcccgtggctgtaatcccagtgctgggaggactgcgtgagcccaggaggtggagaccagcctgggcaacagagcgagaccgcaactgcacgcgcacacacacacacacacacacacacacacacacgctaaaagccacacacgctaaaaaccttttaacatgctgagcttgagcctgtggtcccctctaacctacacgtctttttctcctgagcagacgttaagctaaatccccactcactccagacttccggtcctttgaaatggaggtgcccttgtgtgtcttcaatccatgtggagggtagtctggcccatcccacacctgctactgtcactgcctcacatcagcggcctcaggccacaaggtctccccacctggctccttggggagtgccaagcgttgccagcagccgggctatgctgatcccagacaagtggctcgaccggtcaccactgtccttgagcttaagtccagccttggtgacaaaaatgtcacaaggacctgcatccgagccctgagggcatcaggtcctggaggaggaggaagagtcccttctggcttcgggctgggcttgaggacggcagctccaagaccgcttagagcgagacttcagcgctgactgctggagctacgcaccctgtcctgacaatggccgcacagttaggcgctgctccacgcctggaggagggaactgagggcccgaaatcacagaagcaggaactccaggttcgccagtgcggcctgatccaccttccctcaaacgtagctgctgacaacgacacccacgcgccctctctgggcccagcaggtcagaggtccaggtgggctggctgctccacggccacggctccaaggccaaggtcaaggcactgctgtcctgggccctggtctgggttctccgggagagtccgcgcctgagctcggccgggggcgggattctgctccctgtggccactgggctgaggccccacttccctgctttcggggagccacgtcccccatcacgccatccctccctcctaaaagccagcagggcaaggtccctcttaggcttctgacctgacctcccctcctccagctggagaagggtcccacgcatgaggacatttgtgacgatgccgggacccgaggaatccaggacgacccctctgcagagcccctgtgccccgggaggcaccacacccacggctccagggggtgggggggacggtggcttctctggggctgacccagacctgcagtacacagcgccaggccatgaggtctcagcctgcggtcaggccgcgtgcacggaaacccaggctcctgaacggccagccaggagcaaagccggccactgagtacgggagcaggctccggggacacgctcccactccttttaggggcccagaggctgtggatgaggagctcgagtatccccctctcagtgtaacctccccacccctcccacatcctccaagtggggcaggagccgcctcaccagagctgggggagggggccacacaggtgcacccctggggaggggcagcggagacttgtgggcaggaatgtggccagggtttctagatcatctggtttttcaagagaagccacaagtctgcgtttgagggtggcagcccctggtgttccaaagtcggcaagcaattcaagcatccacacccccaccccggggcagcgttgggtgcccagacctcagggccaccccgagagctcctgcatccacctgggggctcgcagctcccccaagctcctggcgggtagcagtcattccaggatctgataaaagcccccgaaaatgccccggtcagcccagccacacccgggcaacaccgacagccattctccaccagggccccagcgcccagctgagtgagacccacccggtagcttccggggctgggcccctgccccaccagtgaaaacattctggtcacagtgatgccgccctgagaagctcctcaccgtcccccgtggccttggaacccccctcacacccatgggttccaggcaccctggcggctgtctgtccccacgaagcctggccctctcacagcgtagggaggctgcggtcaccagcgtgggtcccgcgacccattccacccggcccctgggcaccggaagccaggcggcgagcgcagcagaccccagaggcagctttcctcagtttacctgacatgcaaaggaagacgcctcctcactccaggctggacgggcagccgacggcggtccggggccatggcgggcagggactttctccgtgaccctccctggctgcccctccccagcaagtgagtcagttccagaaacgtttactgcccgccaggcccgaaggctcaccggctccccctccccacgccccagcacccagggccttggccccaggagcccacagcggcagagactcccaggaaacgcgagtgagccgccttccggaacctggcgcacatcactttcaaaacgcagcggggcctggaaccaaggccaaggccgcctctttcggtttcacttggacgcttgttcttgctggggatggaggtcaatcacaaggctccgggaagcacgggcacgagtcacaaagcaggtcactgagacagcggcaccaggcccgccagtccgatctgctgaccccagccagggcccagcactcccatgccctgcactgcacgaggctgcccgggacagtgcctgcaggggagatgactcggcaatgactctctgggcccctcctcccaccccatcactcatggggttgtccagggcaagaggcccaggggaatccgcaggagagccagggcacagggcacgagtgcggccccaggctgaggcctccgtgggactgagcttcagggccacgctgccatgctgagctctcacggggcctccgcctggaccaccaggcaccctcaggctgactggcccctgtgtgccacccatgtggcccaaggcctgtccccctcatgccaagagccccgtagggccccttcgagtagaatgcagcattccctgcccctccgaagcagtgagtggttcaggggcagagctgggcctgggcgaggggcccccggggggtggggtgatgccatcactgttgccgtcctacgggttgagacaggacagctgcccatcaccccttgatgcaagctggctgcaggctgcctgaccagttcccggggacaccgtgctcaaccctgtggtgacaactggggattccgaaggacagggaggtcttactttctgttaaacacttttattttccctgagatacaatccacaccaggaggggcacctgtccggagcatatgactcaacggtttcaacgtattctaaggcagaccaccacagcttctaattccaaaacattccgctcccccaaaacacagccgtgtccccaacagcagtcactcccccgcctctacagcccctgcaaccacacgcccacttctcttctgtggactggcctgctctggacacgtgaccacacgtctaccccccatctgtggactgccctgctctgcacacgtcacatgaacggagtcacgtgccgtggccttttgcgtctggcgtctctccgcaagcacgtctccgcagagcatccatgccgggcgcacagacgacagatctaatctccgcctcctcacggggcccaggaggcccagggcgagagctgatggggcccacgcatccgaaatccccgtcttggccagaaccccaggtttgccttcgcccgcagggctgagccctctcctgagtcctgggccctgtgacgggtgaccacacctcccagcagggaggcaaggtgaccacggggctggcagtctgctcttcgtcccagcccgagggtgcaggtgccggccaacctcccgggggttgggggcgagagtgcagaggcgaggggcaaggctgagagtccacccacactgccgggcggacagcgggcaggccaggacgagaaccaggttggggtgacctcgcttttaggcttcaacccggcagctggacacacccagccctccccgtgtgctgtctgaccacacagccctcggctgtggaaaaagtgactggaggtattccaggcctgcccgcaacaaatcacacacacatgcacacagggacaggccacacacgtgcacacaacacacgcacacatacaaaacacacgtgcacaagacatgcacaagcaggggtgcatgagaacacgcagcacgcacacaacacacacaacggacacgtgcataacggacacaggtgcacaggcaacatgcgggcacacacaacatgcacacaaagtacacgtttgcatgagcacgggtgcaaaggtcatacacatgcacccacaacacaaacacacacaaaatacatgtgtgagcaacacacgcaagcatgggcacatgggcacaggcaacacacacatgagcacacacacaaaatacacacaaccaccaaaatacacacacacaacatacgaggacaggcacacaggcacgggcaacacacaaaatacagacacacataaccgactcatgaacatgggtacacacaggcacacacacaacacaaacacgggtgcacaggcacacacaacacacaaacacggatgcacagacacgcacacaatgtgcacccataaaacacacgcgtatgaaacacacgagcaacacacacatgcacaggagcacacagccacaggcacgcacattcacacacacacaacgcacccacatccgtacaacacacacacagaacgcgcacacgtccgtacgacgcacacacagaatgcacgtgcgtacgtacaatgcacacaaagaatacacacatccatacaacacacaggcacacaacacacatgtgcatgcacatggcgcaacatacagatacacaaagacacgtgtacacacacatgcagagtccccagggcagcgctggcgtcatggggggctgcctccacaccgcctccaggagtgtttacagctgtggattacatgataccgcccccttcccagagctgatcccaccccccagcatgggggccccctgggagggggcctctgggagccggactggttctgtcgacacagtcgcctctttgttcggggcagagctcactctggcggtgttggcgtttccgcatgggccctgccggaggggcatccgtgactccgctggagccgggttgggccaagcccaagctggtcacacccctcacacccctggggttgggggaggccttaggcagcaagtgggtggggggtctaggggtggctggcgcaacctctctccacctcggtttccccgccaggtgagagggcagtgactgcccatggtcacgcggctggagaacatgcaccctctcctccgcacctgcacacctgggtgcctcctgtctagcccagactccaaagccaaccaagagtgaatggatgaacggagaggccagaccccaaagcaaactgagagtgaatggatgagggaagctcctgctgcctcttctgtgctctgacaggctccctccccctgaagtccagcccctgcctgcacagccccctccacaccagggccctcctggctcctggcaggtgtgggcagatgtctgccgggatcctcagagttaaacaaaagcctcctccctgtgctctgaaatcacactccaggggctggcaggcgccttccaagtccttccctctccaaggacgagagcctgcctgcgtctcctctgccgtctcccctgccgtgggaggccctgaggcccccatcctgctgttctccatcccacccaccaaggggtccagatctcaaattcgccctttctcggcaagaactctgaaggtggcccggagcaggccactgtgagaagccatcaccccacgaccagggtcacccctgggaaaatctggggccgggcagccagatccctgaaggccagaggatgtctgggaagaaagggcgtggacggcacctgctgggcctgccacaaactctctgggtcccatgtccccgctgctcctcttccagggccgagtcagggagagacatcccagggagggcacccgaaacagcacagcacccctcagtcaggaagcagtgccggctgccctggcccggaggaagaggcctggaagaaagtttgaagcctgtaatccccgtgtaatcgggctggctgcccacggggtctgcggccctgggtcctcggcccctcccatgctcttctcttgaacctcggcttcctctgcccctctgtaaaacactcactgcaaccgccccccccgccccggcaaactggcagccagcatcagcacaggccagctccgaggccgggcactctcgctgacagggcgtgcaacagatggcaccaaacctatcccgtcccgtcccagcagtcacaggcaggaaggacgttctgagcaggcgggaacaacaggcattccgggaagaagcagccaggggaggccccggctacacatttaagagattttttttttttttttttaacttttcagaatgttaatcagttcatccagggagacacccaccgtccctgccccagcaccatccgtgcccggcgtccctggaggcgctgggtgggctctccacaacgcctgccccccacgccccaggtcagtctggggattggtccctccaggccccacctgccttattcttcgggactctggggtggtgggaagagtgccctacgggggacaggacccaccaggaggcctgcgcttccccttcaccgacacacgctgctcccgggccccactcgggccatctcagcccgctaccctccctcccgcctgtccctggaagccgggtttgaatgcgacccgcactcccacccccaacacgctctgcagactccgcccagacggccccggggtcacctaatatcagcaagcccccatcccaaaccgggggacctccatgcagaaaccgaaaaaccatctgccccagaagagaagtcggaggccccaggagcgggaggggcggggagcaaggggagggagggagacagggctgcgctgcggggccgagaaggcaagggtcctgggaccggggacaaggaggaggaaggggcacgaacgcccgaggagcctggagtcaggaatcggggcggcgggagagaccgggggtcactcccaggaaggggtcgaggtcacgaggcgcatggagtcgagagtccccaaaagggaaggccaggataccgaggaaaagcgggtgcggggtcaccaaggggctcgggggcaccgatgagtgcggggtcaagggttaccagaaaacgaaaggtcgggggtcaccaagctgcgcggtacagggagtcacccggaagagcgggaaggaaaggttgggagggttgtcgtggaaggtagggttaaggttcacggcagggggtcgccggggggcgggggggcaggtcaaggttcacggcggtggtcgcggggcagcgcggggtcaacgttggcggcgaagggcggggtcggaaggggtcgcggcggagggcgggggtcccgccgcgctcgcccccgccccacggcccccagaacccccagccccgggcgcaggggtccgcggggagcgccggacccacaagcggggtcgggccaggcaggggtcgcggtggagccggggcgggggtcgcaaccagagcctcacctcgggcccgggtccggccgggcgcggagcccgcggcgcctgtttctccgagcctcgcagctgccgccgctcacttccgggtttcgggcgccatcttgggggccccgcgcacttccggtcatgccgcggggcggggcctccacctgcgggggcgtggtctcggttcgggggcggggccaccttccaagccaatcccttgaggtccttccgctattcggaaggggctgggactcctacggctctgggttcgaatcccgccctgcctggttctcttgagaccccagcatgtgctttcacctcctcaagcctcagtttcctcttctgcaccgtgctggtgaaatggaatctgctttgtggtacagcatccccttttttcctccttcctcagaaccccctccaagcctctgcatgtgccacgtcccccactggggctcactcacccgagacttttaaactgagactccctcaaaagctactaagacgatcaccagccgggcgcagtggctcacgcctgtaatcgcagcactttgagaggctgaggcggatggatcacttgaggtcgggagtttgaggccaacctggacaatatgatgaaaccccgtctctactaaatatacaaaaattagctgggcgtgatggcgggcacctgtaatcccagctactcaggaggctgaggcagtagtatcgcttgaacctgggaggtagttattgcagtgagctgagatcgcaccactgcactccagcccgggcaacagagtgagactccatctcaaaaataaataaataaataacgaaataaaataaaatgaaataaaatcatcacctctgggcctgtcagacatactctctcacgaaaagttatctctgttcattaatctctctccctaaccaaatacagttctggacgcttcagcatggtgactggcacatgggggtttgggtaagtcccaggggctacccccaagagagcaggatcctttcaggcagggccacgggggcctgaggggctcctcctctcggtggctgtggtgggaggctgccctgcgtggggagctggagtctcagggcacttttcctgtgacttgagccagtgaaggcagatccagtgtgggaggcaccaccgcctccccagcccaatttcagccatgacaatactgatacagctccctggacccaagcagccacaagccagaggcctctgcccccattccaaccccctgaaactagagttgatttctccatgactttgttaattcattcagtgacttctaatcgatgctgctctgtgcttggtcatgagctgggaaaacccagggtctcacagaggactcagctgtctgtcccaacatcagaaagcccctggtctaggggagagagaaccaggaccagacactccaatatgcgggatctctgggagggttgaaatgtctgcctagggcttcatagagggctgcatgctgaagagtgtgttgaagctggggttttgaagttcaagtaggagtgtaccaggtagacaagagtaggaagaacagtccgggcaaagaaggcctggtaaggcagataataagcaggtttaagatattttagcacctctctaaaaaactgaggccaaaagccaggcacggtggctcacgcctgtaatcccagcactacgggagtctgaggcaggaggaacacctgaggtcagcggtttgagaccagcctggccaacatggtgaaaccccatctctactaaaagtacaaaaaagttagctgggcatggtggtgcctgcctgtattcccagctactagggaggctgaggcaggagaatcgcttgaacccaggaggtagaggttgcagtgagctgagatcacaccactgcactccagcctgggcgatagagtgaggttcggtctcaaaaaaacaaacaaacaaaaaacggtggctcacgcctgtaatcccaacactttgggaggctgaggtgggtgaatcacctaggtcagaagttcaacaccagcctgacgaacatggtgaaaccctgtctctactaaaaatacaaaaattagccaggcgtggtagtgggtgcctgtaatcctgactactcaggaggctgaggcaggagaatcacttgaatctgggaggcggaggttgcagtgagctgagatcgcgccattgcactccagcctgggtgacatgacaagaccccgtctaaaaaaaaaaaaaaaaaaaaaatttcaggccaaggacccctgtcatcaaacccaaaagcacaagggggcagatggggaaactcagacccagaaggcagaagtgatatgtccagagtgagatgcagaaggcgcacaaggacattttgtccttcagctcattgggggtctcctttacccatggtgacagaacggcgtccacctgttgtgagcttttcctcagagtcccgcagagcagccggacccgacagagatacttc[132 bp omitted]cct[175 bp omitted]cccggccaaatctccttttttttgagatggagtcttgctgtgtctcccaggccggagtgcaatggcatgacctctgcctcccggttttggcaaactgggtgctcatctcaactttgagactattttctcttttttttgagatggagtttcactcctgttgcccaggctggagtgcattggcgcaatcttggcccactgcaacctcctcctcccctgttcaagtggttatcctgcctcagcctgccaagtagctgggattacaggcatgtgccaccatgcccagctaattttgtattttccgtagaaatagggtttc[133 bp omitted]gttaaattgagcaataggcactaaagatttggaagggtgaggaagccagcctggggactggagggtggcggctgcatctgctcatttcctcccacactggaccatccacacaacttttgaggatcagtggaaatgaaaacacggtgccccggcacaaaacatatttcatagcttgggttaggcaacagcaaagcatcacgctgagcgccgggaccttctgagtgcaggcggtgggcgaagccccgagtcacacacacccacgacgccggccctgctcccacagcggccctctggggtagcgactggtattacctgcatttcacgagggaggaaactgaggcacgaactgttcagaagctgccctgaggtcaccaagtgagctaggaagaggcgtgggctcgatctctgccacatccacctcgggaaaccacaaggtctcgatgggtgattttgcctaaagtgggggcagtttgcccaggccggggtgggtccagccatctcagcaggcaggaatctgccaagttgggggatgcttagggaattagtcagatgcggggatttccagggaatcacagggggtggctccggaaagcagcagggacacagtactggggctcatggcccagcctggagtacagtgctgtgaatctgctgtgtgacccaaggagagttacttaacctctctgtgccccggttttcccacctataaaatggggagggtgataataatagcaactagtggccgggcacggtggcttatacctgtaatcccagcactttgggaggctgagacgggaagatcacgaggtcaagagattgagaccatcctggataacatggtgaaaccctgtctctactaaaaatacaaaaataagccggacatgatggtacgtacctgtggtcccaaccactccggaggctgaggcaggagaatcgcttgaacccgggaggcggaggttgcaatgagctgagatcgcaccactgcactccagcctgggcaacagagcaagactctgtctcaaaaaaaataataataatgataataataataatagcaactagctgctaggttgttcagacaactcaatggacagacagtgcctaatagaatttaaccactacgaatatttccaaatgaaattctttttttttttttttttgagacgaagtctggccctttcacccaggctggagtgcaggggcatgagctcaacttagtgcaacccctgcctcttgggtccaagtgattatcttgcctcagcctcccaagtagctgggattacaggcacgtgccaccatgcccggctaatttttgtattttcagtagaggcagggtttcaccatgttgaccaggatggtctcgagctcttgacctcgtgatccgcctgccttggcctcccatattgctgggattccaggcttgagccaccctagggaaattcttgattttcctcggcccagtccatggcgtcactgaagtggatgttcaatgagaaaataataaggatgaatgctgcagttggagttcaagagaggaggcatttttgacgccacagatgggcagagatggggtgagggccctggccggcaccagctctcctggctcagactttggaagccgccccccaggggagacgctcaactggtcagaggtgtggatagccccgtcccccagtagtcccaccccgcagagagctctcaggcttccagctctggcccaggcccaggtcctcggtgccatgtgaagggtggagagctctcctgggggacagagttgtacatttgtggaggttttctggtggggctgtgtttgacgtcaacactctcctccctaaaccctccctcttccccatcccatacaggtcctcctaaatgtcttcccagccccttcgagagaattgtggaagtggggttgccagatcaaacacaagacacccagttaaaattcaactgtaggtacgtgacgagtactttttgttgctgctgctgttgttgttcttgttgtttttgagacggagtctcgctccgttgacaagaaggctggagtgcagtggcgcgatcttggctcactgcaacctccacctcccgggttcaagtaattctctgcctcagcctcccgagtagctgggactacaggcacccgccgccacacccggctaattttttgtatttttagtagagacggggttccaccatcctggccaggctggtcttgaactcctgacctcgtgatccacctgcctcagcctcccaaagtgccaggattacaggcgtgagccactgcgcccaggctttgttgttgtttgagactgggaatcaccctgtcgcccaggctggagtgcagtggtatagtcacagcccactgcagcctctgcctgctgcgctcaagcaatcctccccagtcagcctcctaagtagctgggactacaggtatgcaccaccatgcctggccaatttttttactttttatagagacggggtttcaccattttacccagattagtcttgaactcctgagctcaagcagtcctcccaccttggcctcccaaagtgctgggattacaggcatgagccatcacacctggcccatttctttctttctttctttctttctttctttctttctttctttctttctttctttctttctttctctctttctttctctctctctctctatttccttctttctttctttctctctctctctctttctttctctctctctttctttcttttttttgtagagatggggtcttactgtgtcgcccagcctggtctcaaactcctggcctcaagcaatccacctgcctcggcctcccaaaatgctaggattacaggcatgagccactctgtccagcctgtcttaattatttcaaattgcagaaaacttcagacaaacatgaaggttgtttgtaaggaccttcttgggctgtgcctcagtttccccatctgggagatgccagcctggattcccctcccggcctcagtgtctctcctgggcggcaagaaggaccctgggactgtgcccactctgccgtccagggggccgagggaggtgcccagggagggggaggtgcgtggtggtgacgggcggctcccgcacagagcctcagacctgggcaggtgaggcaggcaggtgggtctggcccggcgcggcccgatgcgggggcagggatgggatggagccacttcctgtttctccacattctggaaagtccctgtgttcccaggcagagggggcacctcctccctgccagccctcctgggcgccgggctcctcaccacttctccttcctccacccacttccccagcggacgggcctgggacccgccccttcccctcctgcctctctcctcttttctttcccaatcaggcccttcctggtgtgcagaagggaaagctgattccacagcagctgggcctgcccgacccaggaggctacatctgtcacccctctgtctgtctctgtctctgtctctatctgtctctctgtctctctctgtctctttctctgtctccttgtctgtctgtctctctgtctccatgtctctctgtctctctgtcttcgtctctctgtttctggctctctttgtctctctgtgtctcagtttatttctgtctctttctgtgtctctttgtctgtgtctctgtgtccctctgtctctgtttctctggctctggctctgtgtccctgtctgtttcttttttttttttttttttttttttttgagagagtctcgctctgtcccccaggctggggtgcaatggcgcgatctcggctcactgcaagctccgcctcccgggttcacgccattctcctgcctcagcctcccaagtagctgggagtacaggtgcccgccaccacgcc[187 bp omitted]tgtctctgtctctgtgtccctctgtctctctgtttgtctctctctgtgtctgtctctgtctccgtgtctctctgtctctgtctttgtctccctgtctctgtctctggatccctctgtctgtttctctagctctctctttgtctctgtctctgtttctctatctctgtctatctctgtctcagtcccttcttttgccaccatccccctcccgtggccgccctcacgtgtcagcaccataccctccctgtggtcagggccacctgctccagggtgtcctcaggtcggtgctggccggcgtgttcccgggccctgcagccacctgcttgaccagggccaggcccagagtgagatcctaccaggccaggtcggggcagcctctgtgccaagacaactttagggaacaacaaacctgtctgacgggtttgagattccacatgggacaggctttctcacctccgcactgacgctaggacagctgggttgaaggggcccagtgacacccctgacatagcacctcaggctgggtacaggctgcagcagcctagtctgggtcagggctgtgtcctgaggttggggcacccagggcaggctgggtgaaggaagatcagcaatctgccggtcgccctgtgcagggaggataaacagggagaaggcactgcacatgcaaagtctcagcggggacaaagactcaggggagagtgtgcggggcctggggtgtgaggatagatggactgggagagagagaggggaccctggagggcctggaagctagacgtggcctgtattctgggggcactagggaaccattgagggttctggagcaacggagtggtacagtcatggtggggctagcggtgtactggatggggtgaggcacagggaccgaatttcagatcagaaggctcatctggtagtcagactgaggccggaggaggctcaactgccccgaggatgaagaaaggagccaaacttggccgggtgcagtggctcacgcctgtcatcccagcactttgggaggccaaggcaggtggactgcctgaggtcaggagtttgagaccaacctgccaacacggtgaaaccccgtctctactgaatatacaaaaaaattagctgggggtggtggcgggcgcctataatcccagctactcggcaggctgaggcaagggaattgcttgaagcagggaggcggaggttgcagtgagccgagatcgcaccactgcactccaccctgggtgacagagagagcaagattctgtctcaaaaaaaaaagagccaaactttgaacttcttttttctttctttcttttttttttctattttgagacagggttttgctctgtcgcccaggctggagtgcagtggtgtgatctcggctcacagaacccttgaactccttgcctggagcaatcctccctcctcagcctccagagtagctgggatgacaggcgcaccactatgcctggttaattttaaattttgttggccaggcgcgatggctcatgcctgtaatcccagcactttgggagaccaaggcgggtgagtcacctgagatcaggagttcgagaccagcctcaccaacgtggtgaaaccctttctctactaaaaaaaaaaaacaaaaacaaaattagccaggcatggtggcacgcacccataatcccagctactcgggaggctgatgcaggagaatcgcttgaacccaggaggcggaggttgcggtgagccgggatcgcaccactgcactccagtctgggcgaaagagcgagactccgtctcgacaaacaaacaaacaaacaaacaataaataaataaataaaccttgtttgtagtgaagaggtctcactgggttacccaggctaatcttgaactcctggcttcaagtgagcttcccacctcggtctcccaaagtgctgagatgacaggtgtgagccgctgcacccggcctgaacttcctatcaggtgctcattatgagccaggattgagctacagaaaatgcgagggaggggagacggcccccaggatgcccccaaaccggtactctgcaccccctgggcccacatctaaggacgacaaggcagaggcctcaaatgccaggtcctgtggctttgtccccggggcggtggggagccacgggcagaagtagggcaccagaggagattgctctgccagggctggggccagagcaaagggccgggggcagggcaggggcgttggatcgttggatggggctgcaaggtggggagggcaggttggggccatgtattcatccgagatgaatttctcagtgccacccagggccaggccccacttgcaggtgccagggccactacagagaacagacacaccctgagggggtccccaggccacgaagaagccggatgctggagcagcctaggacacagacaccttggcccttcccaggcaggcccctgccacgtgagtgcagggcaagggtcccaggagggggaacgggctccaggccccaccatggctgccctgagtgtacgcagtggtcagcccagtgctgatgtcacctgtgtggggacttcctggaccttcacctcggatccgctgcccggccccgagggaaattccagagaagccagggccgctcctggctgactcattctaggtgccagtagcacgggaggggctgggcaatggagggcctgggggcatttggagaactgtgaggagtctgaccacctcctctgagggccagtttctgctgcgtcccacggggacttggggaaaacttggactccccagccccagccctggcatcattttttttttttttttgagacagagtttcactcttgttgcccaggcatgggtgcagtggtgcgatttcggctcactgcaacctcagcttcccgggttcaagtgattctgtcgcctcagcctccccagtagctgggattacaggcgcctgccaccgcgcccggctaaattttgtatttttagtacagacagggtttcgccatgttggccaggctggtcttgaactcctgacctcaggtgatccacccgcctcagcctcccaaagtgctgggatgacaggcgtgagccacagtgctcagcccaggccagcatctacagggcacaagtgggaatctgggttctaggaggtgagaactggggggtggggggttgcaatgggtggagagtgctttcccttccctgcaggccttctcacgtccacagggttgcaagcgggactggcagagttgaaacaaaagtcagggagcagggctgggcgcagtggctcaagcctataatcccagcactttgggaagccgagggaggctgatcacctgaggtcaggagttcgagaccagcctggccaacatggagaaaccccgtctctacaaaaaatacaaaaattagccgggcttggtggcgggtgcctgtaatcccagctactcgggaggctgaggctggagaattgcttgaacctgggaggcggaggttgcagcgagccgaggtcgcaccactgcactccagcctgggtgacagagcaagactccatctcaaaaaaacaaaagaggagtgtgggaacaagtagtgaagatttccaccgttcaaatcccgccactcccccccggggctctgtgacctcaggaaggcacatgacctcccacacttcagtttgcccatctataaaatgaggataatcgtggtacctcctttggaagccttttgtgagaatttggtaagttctggtatgtgttaagtgtttggagtggggcttggggtatggtgaag[137 bp omitted]aagccctgtctctagtataaatacaaaaattagccgggggtggtggtgcacacctatagtcccagctactgaagaggctgaggcaggagaatctattgaatctgggaggcagaggttgcagtgagctgagatcgcgccattgcactccagcctgggcgacagagccagactccacctcaaaaaaaaaaaaaaaaacaaacaagaatcgtttggttgcagctgacagaaattgaaactacaactggctcctttttaaaaaacaggaattttttgctcatggaactgaaagatttagggatagagctaactcaaggccacccctctcagcaccgttgatgttctggaaaggaccattcactagggtgggggccgtcctgggcacacagggtgctcagcaatgaccctggcctccacccagtcaacgtctgtagcgtccccacccggtcatggtgaccaaaaacatctccagacattgctgagtgtcccctgggggtgtaatcacccttggttgagccctactggtctggcgggtttcagacacagctggatccaggaccctcggtcagtgtcacaaggatgtgtccaattctccatc[132 bp omitted]ctgcaacctctgcctcccgggttcaagtgattctcctgcctcagcctcccgagtagctgggactacgggcgtgcgacaccatgtctggctaatttacgtatttttagtagagatgggcttttgccatgt[137 bp omitted]ggaaaagatgatgccataagccccaaatctcatctgcccatcatcttaacagccctggcaggagtcaacacctcttcccaaggtgggggcaccaaagtgccagggaggttctcattcgcccagcctgggtcacatgtcctggtgggctgtggcctggtaaggggatgcccagattggccaggcagggatcacatggttgtatggagtgagccaattgggtgaaaactcgtggtcgggatgggcacggcggctcacgcctgtcatcccagcactttgggaggccgaggcgggcagatcatgaggtcaagagttcgagaccatcctgggcaacatggtgaaactttgtctctactaaaaatacaaaaattagctgggagtggtgttgcatgcctgtaattccagctactcgggaggctgaggcaggagaatcgcttgaacccgggaggcggagcttgcagcgagccgagatcgtgccactgcactcccagcctgggcaacagagtaagactctgtctcaaaaaaaaaaaaaagtacaaaacatgagccgggcatggtgacgcacacctgtggtcccagcaactcaagaggctgaggagggagaatctcttgaaccaaggaggtggaggttgcagtgagctgagattacatcactgccctccgg[141 bp omitted]tggtgaaaccctgtctctactaaaaatacgaaaattagctgggcatggtggcggatgcctgtaatcccagctactcgggaggctgaggcagagaattgcttgatcccgggaggcagaggttgcagtgagctgagattgcgccactgcactccagcctgggcaaca[218 bp omitted]gaggcaggagaatggtgtgaacccgggaggcagaggttgcagtgagccgagatcgcgccaccacactccagcctgggcgacagagctagactctgtctcaaaaaaaaaggaaataataataataacaaaaaacaaaaacaaaaaaaccctcctctatggacagaggcatgattggcaggggtgggatagctgttggcaaagaaggcccagctgtgctaagcaggccacccatcccatggaagggctggcatggaggcagcaccagtagacatcagaggatgaatgagtgggatccagtgctgctcaatgaatacatgcgggttgttttgtttttgtttttttgtttttttgagacagagtcttgctctgtcgcccaggctggagtgcagtggcacgatctcggctcactgcaacctccgcctcccgggttcaagcaattgtccagcctcagcctcccgagtagctgggactacaggcgcccaccaccacacccggctaattttttgtattttcatttgtttgtttatttgtttgtttgttttgagatggagtctcactctgtcgcccaggctggagtgcagtggcatgatctcagctcactgcaacctccgcttcccaagttcaagtgattctcctgcctcagtctcccaagtacctggaactacaggcgcccaccatcacacccagctagttttttttttgttttgttttttgttttttttgagacggagtctcactctgtcgcccaggctggagtacagcggctccatcttggctcactgcaacctctgcctcttgtcttcacgccattctcctgcctcagcctcccgagtagctgggactacaggtgcccgccaccaagcctggctaatttttttttttttttgtatttttagtagagacagggtttcaccg[272 bp omitted]ttgagacacagtcccgctctgtcacccaggctggagtgcagtggtgcgatcttggcccactgcaacctccacctcccaagttcaagcgattctcctgcctcagcctcccgagtagttgagattacaggtgcgcaccaccacacctggctaattttgtatttttagtagagacgggttttctcatgttggccaggctggtctcaaactcctgacctcaagtgatctgctcacctaagcctcccaaagtgcagggattacaggtgtgagccactacacccagcctcttttttttctttttctttttgagacagggtttcgctttgccatgcaggctggagggcagtggtgcaaacagggctcacaggcagaggctgctctgcctcctaggatcaagggatcctcccaccgcagcctcctgagtaactgggattacaggcacaagccatcatgcccaggtaatagttttaaggttttttttagtagagatggggatctcactatgttgctcagcctggtctcgaactcctggcctcaagtgatcttcccgcctcagcctcccaaagccttgggattactgggtgagcccccgtgcccagccagtggctgcttgcactggctggcctccaaagctgaaagtatttgctccctggcccttaacagaataggtgggctgacccctgctctatgtggttctttgtccccaggcaaggattcagggacatctcagagccgctggggtctcgtcggtaaagtggtggtggacggcatggaggaactttagccctggaccagaaactttaggtcagtctatgtcagccattgttgctatcagccttcaggtcgtctgggctgggaggtctcctccctcttcctccaggcaccagtgggagcaggcagtcacaccttcctgtgagtgagaaccatagcagaaccttcaaagcacctctcaagtcgggtgagtcagcagaggcctgcagacagggttgacgggggcagggtgtggggatgtgggagacccagactgggggccagcaaaggctgttcggaggaggtgaccactgagctatgacctgaatgagtgaacgaggcagttattttatttttttgagatggagtttcgctcttgtcgcccaggctggagtgcagtggcacaatctgggctcactgcgacctccacctcccgggttcaagcgattctcctgcctcagcctcctgagtagctgggattacaggcggccgccaccacgcacagctagttttgtatttttagtagagatggggtttctccatgttggcca[132 bp omitted]gggaggagcctttgaggtggcaggagggaaccagtcctgatgagggaagattaaaggacagtggggctggggatggtggcccacacctgtgtttgcagcactttgggaggctgaggcaggaggatcactagagcccaagagttcaagatcagcctggcctacaaaaaaatatttaaaaatttgctgggtgtgggaggctgaagtcagaggatcacctgagcccagggagttggaggctgcagtgagcggtaatcatgccactgcacttcagcctgggggacagagtgagaccctgtctgaaaaaaaaaaaaattgggccaggtgcggt[169 bp omitted]gaggcaagagaatggcctgaacc[143 bp omitted]gaggcaggagaattgcttgaacccgggaggtggaggttgcagtgagccgaggtcgcaccattgcactccagcctgggcaacaagagcaaaactccatctcaaataaataaataaataataaaaaaataaaaaataaagagggtgggcatgatggctcaagcctgtaatcccagcattttgggaggctgaagcaggtggatcacttgaggtcaggagttcgagaccagcctggccaacatggagaaaccctgtctctactaaaaatacaaaaaataaaataaaataaaataaaataagccaggtgtggtggcgggtgcctgtcatcccagctaactgggaggctgaggcaggagaatcacttgaactggggagaaggaggttgcagtgagccaagacagctgcactgccctttaacccaggcaatagagtgagactatgtgtcaaaaaaaaaaaaaaaaaaggacattattagagttggaaggaaatgaccataggcccagggttccacggtccagaccaccacacacaactgatgcaggatataaccgagtcattccatcccaggtaatacccaagtacccacgggaggatcaacatccacggaaaagcctgtgtacaaatttcatagtagcaaatgcttctcctatgcgtcttttttttttcttttttcttttttttttttttgagacagagtcttgctctgtcacccaggctggagtgcagtggcacgatctcggctcactgcaagctctgcctcctgggttcaagcaattctcctgcctcagcctcctgagtagccgggactacaggcgcgcgcc[131 bp omitted]caccgctcccggacacgtctggctaatttttttgtatttttactagagacgaggttttgccgtgttccccatgctggtctcaaactcctgggatccagtgatccacccaccttagcctcccaacatgctgggattacaggtgtgagctactgtgtccggcccaaattgtctaatttttaaaaatagtttctgggttatggatctgaataaagcgtgcaattagtgaacagtttataaacctcttgtgtgcttttaatttattttattttatttatttatatatattttttgagacagagtctcgctctgtcacccaggctggagtgcagtggtgcgatctcagctcactgcaacctctgcctccagggttcaagcgattctcctgcctcagcctcacgagtagctgggattacaggtacctgccagtatgcccggctaatttttgtatttttagtagagatggggttttgccatgttggccaggctggtctcgaactgctggcctcaagtgatcctccctcctggccctgcacagtgctgggatgacaggctgagccacctcaccggcctcttatgtgccttttaatctgcaggttcgccctccctctctctttctgtggtttgtttttgtttttttttttctttttttcttttgtatgaaacccagttgtttttcctgttaagtttcccacagtctagaatttgctgatttttttctgtgataatttaagtttttgaatagtgatgcattcccgtgtcgtaaaactgaagagtcaaaagcatacccagactgcagccgctggggaagagtgtggtagctccacaagaagttaaacggaggcggggtacgggggctgggcgtggaggccgggcgcaggggcggatgcctgcaaccccagcacgctgggaggccaaggcgggcggatcacttgaggtcaggagtttgagaccagcctgactaacatagcaagaccccatctctacaaaaaatacaaaaaaattagctaggcatggttaactgctgtttttgtcaagatgggttattactatgttgcccaggctggtttcaaactcctgtcctcaactgactcagaaggatcaacttagcccaggagttcaacatagcgagaccctgtctctacaaaagaaatgttaaaaaaattaaccaggcctggtggcatgcacctgtactcccagctacttgtgaggctgaggtgggaggactgtttgagccatggagtctgaggctgcagtgagctacgattgcacctggaacccaggcctctcccgtctggaacccaggccctcacctacactgtcagcccctccacctggaacttgtagaacttacctgtaagcccaggcttcacctgaaaccccagtcccccacctggaacccaggccctcacctacactgtcagcccctccacctggaactttagaacttacctgtagccccagccttcacctgaaaccccagtcccccacctggaacccagtcccccacctggaacctgggcctccccaacctgtaacccaggcccccacctagaacctgggcctctgtgatctgtaacccaggccctcatctggaacctagggctctgtggaaactgtggcactcacatgtaaacctggcttccacctgaaaccccagtcccccacctgtaatccagcttgggt[144 bp omitted]aaacacgtctctaataaaaatataaaaattagctgggcatggtgatgggcgcctgtagtcccagctactcgggaggctgaggcaggagaatcccttgaaccgggagacagaggttgcagtgagccgagatcgtgccactgctctctagcctgggcaacagagcaagactccgtttcaaaaaaaaaaaagggaataaatgtcatgttacatatattttatgagaattctaaaatatattttatggcagggcacagtggctcacgcctgtattcccagcactttgggagtctcgctctgtccccaggctggagagcagtggtgcgatctcggctcactgcaacctctacctcccgggttcaagcgattctcctgcctcagcctcccgagtagcttggactacaggcgcccgccaccacgcccggctaattttttgtatttttaatagagacagggtttcaccgtgttagccaggatggtctcgatctcctgaccccgtgatctgcccccctcccaaagtgctgtgattacagacgtgagccaccgcgcccggcctattattttttactttttttttttttttttgaggcggagtcttgctctgttgcccaggctggagtgcagtagcatgatctcggctcactgcaaccaccgccttccaggttcaagcgattctcccgcctcagcctcccaactagctgggattacaggtgcccgccaccacgcccggctaatttttgtatttttagtagagatggggtttcaccatgttggccaggccggtcccgaactcctgacctcaggtgatccacccgcctcagcttcccaaagttctgggattacatgcgtgagccaccgcgcccggcctatttttcacttttttttttttagccgaatgtggcgaggacagttatcggattatttgcagcggatcctacacgtcccctcctcctgcctcttgccctgcgctcccgaaggggcctccggacccggaggatctcaccgcggggcggggtccacggcgagggggctcggccaagcgggcagcctcgcgcacgcgcactcaacccggacgcgggcctctccgccgcagcccgcgcccgccacctggcggccacagcggtccgcgcagaccgccggccccttttctatccgcgaccggatacctggcaggggtctaggaaagacccctctggctgctgcggggccagtgcgtgcgaggctcgaccccactccattgcgtgggggggctgagctaggtccgtgaagcggggcggttgcgatcaaggccccgactttttttttttttttttttttttttttttttttttgagacggagtctcgctctgtcgcccaggccggactgcggactgcagtggcgccatctcggcgcactgcaacctctacctcccgggttcaagcgattctcctgcctc[224 bp omitted]acgggtctgcggccagagagaggccaggagggaggactggcgggcatttctccgcagggtgggggtgaacgggggcctgggcatcggagccggggggaacgtggggtcagcgaggggttctaggggaggaaatggtaggagagctcctgccctgcaggctggagggcaggatctgtgtgtttggggggagtcatgggtgggtaggagagatgacaggtgacagcctggaggaagagatggagggaggcttgagccctgggcggggctggcagaagcccccacctataacttgggacctctgaacctggaacccagcccccacctgggacctgggcctctcccatctgtaacccaggccctcacctagaacctctgaacctggaacccagcccccacctgggacctgggcctctcccatctgtaacccaggccctcacctagaacctgggacctctgaacctggaacccagcccccacctggggcctggaacctccaccaggaacttgtgccc[224 bp omitted]gaggcaggagaatggcgtgaacccgggaggtggagcttgcagtgagccgagattgcgccactgcactccagcctgggcaacaaagcaagataccgtctcaaagaaaaaaaaaaggaaaacccagttccccacctagaacccaggccccgacctgaaacctgggcccctccacttgtaaccagggacccccacctagtatctgagcctctcccatctgtaacccaggccttcacctagaacctgggcctctgcaagtgtaacctggggttcctaccaggaacctgaggccctcatgtgtaacctgcggcccccgacctggagcctgggcctctctcatctataacccagaccctcacctagaacctgggcccctgcaactgtaacctgtggcactcactgtaagcccggacttcacctgaaaccccagtcccgcacctgtaaacctacaccccgccaggaacctgggcctctccaacctataattgaggccctcacctgtaacttaagcccacacttgtaacctggggctctctgctataacttggggcccccacccataagccagttcccttaacagaacctgcagtttggtgaggatgagagaatgcaaagaaagcattttccccaggactaccataaatagtcataagcatcactttttcctattaccatagcattaccatttgtcacggtttacccacccgaggtcactctgcctctttttcactttattttttttttatttttatttttttgagatggagtctctctctgtcgcccaggctggagtgcggtggcgcgatctcggctcactgcaagctccgcctcccaggttcacgccattctcctgcctc[224 bp omitted]acgggtctgcggccagagagaggccaggagggaggactggcgggcatttctccgcagggtgggggtgaacgggggcctgggcatcggagccggggggaacgtggggtcagcgaggggttctaggggaggaaatggtaggagagctcctgccctgcaggctggagggcaggatctgtgtgtttggggggagtcatgggtgggtaggagagatgacaggtgacagcctggaggaagagatggagggaggcttgagccctgggcggggctggcagaagcccccacctataacttgggacctctgaacctggaacccagcccccacctgggacctgggcctctcccatctgtaacccaggccctcacctagaacctctgaacctggaacccagcccccacctgggacctgggcctctcccatctgtaacccaggccctcacctagaacctgggacctctgaacctggaacccagcccccacctggggcctggaacctccaccaggaacttgtgccc[224 bp omitted]gaggcaggagaatggcgtgaacccgggaggtggagcttgcagtgagccgagattgcgccactgcactccagcctgggcaacaaagcaagataccgtctcaaagaaaaaaaaaaggaaaacccagttccccacctagaacccaggccccgacctgaaacctgggcccctccacttgtaaccagggacccccacctagtatctgagcctctcccatctgtaacccaggccttcacctagaacctgggcctctgcaagtgtaacctggggttcctaccaggaacctgaggccctcatgtgtaacctgcggcccccgacctggagcctgggcctctctcatctataacccagaccctcacctagaacctgggcccctgcaactgtaacctgtggcactcactgtaagcccggacttcacctgaaaccccagtcccgcacctgtaaacctacaccccgccaggaacctgggcctctccaacctataattgaggccctcacctgtaacttaagcccacacttgtaacctggggctctctgctataacttggggcccccacccataagccagttcccttaacagaacctgcagtttggtgaggatgagagaatgcaaagaaagcattttccccaggactaccataaatagtcataagcatcactttttcctattaccatagcattaccatttgtcacggtttacccacccgaggtcactctgcctctttttcactttattttttttttatttttatttttttgagatggagtctctctctgtcgcccaggctggagtgcggtggcgcgatctcggctcactgcaagctccgcctcccaggttcacgccattctcctgcctcagcatcccgagtagctgggactacaggcgcccaccaccacgcccagctaaattttgcattttttagtagagacggggttt[132 bp omitted]caaatttatgaattcaaggccaggcttagtggctcatgcctataatcccagctttttcggaggccaaggtaggtggattacttgatgtcaggagttcgagaccagcctgggcaacatggtgaaactccgtctttactaaaaatacaaaaattagctgggcatggtggtgggcacctgtaatcccagctactcgagaggctgagacaggagaatcgcttgaacccaggaggcagaggttgcagtgaaccaagactgcgtcactgcactccagcctgggcgacagagca[135 bp omitted]cccgtctccactaaaaataaaaaaaaaaaacctagccaggtgtggtggcgcacgcttgtaatcccagctactcgggaggctgaggcaggagaatcgcttgaacccaagaggtggaggttgcagtgagctgagattgtgccactgcactccagcctggacaatagagggagactccatctaaaataaatacataaatgaaaatgtgtagatatctacgagttcggtggggattcatacaacagtgcatctcattcccgaccgtgtcttatctttgatgacagggtcatcgttaatcctccatccagagaaatgggaagttagaggccaggacctcccagctgaagatttctgtgggacacagggctgggccagagaaaagggccctgcaggagacccttagaatagccgccgggcgactggccccacggtgccgggaaggaccctttgatctgattccgccatatgatccggttccgtgctggcccagcctggcctgggttggatgcctggtccgatgcccaaagccccatcaccctgaagcagatggagctggcatcctgaatgagactcctgggggctccagggctctcaggtgggagtcccagagccaccagggacctggagtgtagacctgggcagggagcttgctctctgccagctgcagtgggctcacctgtgagggaggatgttagaatagttcttttttaaaaaaaaaaattttttttttgagacaggatctggctctgttgccaggcaggaatgcagtggcgtgatcatggctcactgcaacctccacctcccgggctcaggtgatcctcccacctcagcctcccaagtagctgggaccacaggcgcccgccaccatgactggtgagtttttgttttttgttttgttttgttttgtttttgagacaagagtctcactctgttgcccaggctggagggcaatggcgcgatctcggctcactgcaacctccgcctcctaggttcaggcaattctcctgcttcagcctcccgagtagctgggattacaggcgccagccaccacgcccggataattttgtatttttagtagatactgggt[136 bp omitted]gtt[131 bp omitted]agggtcttgttctattgcccacactggagtgtagtgacataatcccagctcactgcagcctcaaactcccagcctctgttgatcctactgcctcagcctcccgagtagctgggactacaagcgtgggccactgctcctggtctattttcagttttttttttttgtttgtttttgagatggagtctcactctgtcgcccaggctggagtgcagaggcatgatctcagctcaccacaacctcctcttcccaggttcaagcaattctcctgcctcagccttccaagtagctgggactacaggcatgcaccactacgcctggctaatttttgtattttttaagtagagacaggctttcaccatgttgcccaggctggtctggaactcttggcctcaagggatccgcccacctcggcctcccaaagtgatgggattacaggcatgagctgccatgcctggccctattttcactttttgactcttgtgaataacgctgttttgaaaattcatgcgtgtttgtgtgaacaggtttctagttctctcgggcatatatcttggggtggaattgccagtacatatagcaactctatgtttaaacttttgactcttttccaaaggggttgccccgcttatgagaattctggtttctccacatcctcaccaatacttgttatggtccatctttttttgttatttatatattttatctatttttatttttttgagacggagtcttgctctgtcgccaggttggagtgcagtggcgtgatctccgctcactgcaacctctgtctcccgggttcaagtgattctcctgcctcagcctcccgagtacctgggattagaagggtgcgccaccacgcccaactaatttttgtatttttagtagagacggg[145 bp omitted]gctatgttgcccaggctggcctcaaactcctaggctcaagagatcctcccaaagttctgggattacaggtgtgagccactgtgcataaccctgaagtggttaattttaataatacatttactttagcctaacatatccaaaattacatcatttcaacatgcaatcattattaaaattattaatgagatattttattttatttttatttatttatttttttgagacggagtctcgctctgtctcccaggctggagtgcggtggcgcgatcttggttcactgcaagctccgcctcctgggttcacgcctttctcctgtctcagcctcccgagtagctgggattacaggtgcccgccaccacgcccagctaatttttgtatttttagtagagaccaggtttcaccacgttggccaggatggtctcgaactcctgacctcgtgatcagcccaccttggcctcctaaagtgctgggattacaggcgtgagccactgtgtctggccagtgagatattttatttgtgccctttttttttttttttgagaccgagtctcactgtgttgcccaggctgcagtgcagtggcacaatcttggctcactgcaacctctgcctcccaggttcaagcgattctcttacctcagcctcctgagtagctgggattacaggcgggcgccacgacacctggctagtttttgtatttttagtagagacgggggttttaccatgttgcccaggctggtcttgaactcttgacctcaggtgatcacctgccttggccccccaaagtgctgggattacaggcaaaagccgccataccaggcccatttttttttctttcgagacggagtctcattgttgcccaaggtggagtgcaatggcaagatctcagctccctgcaacctctgcctcctgggttcaagcgatcctcctgcctcagcctcccaagtagctgagattacgggcgcccgccaccacgcctggctaatttttgtatttttagtagagacagggtt[134 bp omitted]aattcagtgtgtagggcaggcatggtgcctcatgcctgtaatcccagaactttgggaggccgaggcaggtggatcacctgaggttaggagttcgggaccagcctgaacaatatggtgaaaccctgtctctattgaaaatccaaaaattatccagccatggtggtgtatgcctgtagtcccagctactccagaggctgagacaggagaattgcttgaatctgggaagcagaggttgcagtgaaccaagatcatgccattgcactccagcccgggcaacagagcgagactccgtctcaaaaaaaaaaaaagagagtcagtgtggagggaagtgtctctgttgggtccgggtgctctgtgggactctgaggaaaagctcgcaccaggtagatgctgttctgtccccatgggtaaaggacaccccaacaaaccgaggagcaaaatgtcctcgtatgccctcttcgcgcagacctgccaggaagagcacaagaagaaacacccggactcttctgtcaatttcgtggaattctccaagaagtgtttggagagatggaagaccacgtctgcaaaggagaagtgaagtttgaagagaaggcaaaaagtgacaaagctcgctgtgacagggagattaaaaattacattcctccgaaatgtaagaaagggtaagaaaggaaagaaaaaggatcgcaatgctcctagaaggccaccatctgccttcttcctgttttgctctgaacatcgcccaaagatcaaaagtggacacccaggcctatttgtcgtggaaactgcaaagaaactgggtgaaatgtggtctgggcagtcagccaaagataaacaaccatatgagcagaaagcagttaagctacaggagagatatgaaaagggtattgctgcatatcgtgctaagggcaaaagtgaagcaggaaagaagggctcaaagaagaacaaaccagaagatgaggaggaggaggaggagaaagaagatgaagatgaggaggaagagggtgaagatgaagaataaatggctatcctttaatgatgcctgtgcagtgggcttgttttgctaagaatgtgaattctagtacagctcagtattagcttcagtataaaactgtacaaattttcgtatagctcataagattctctgtacagaaaatacttttcttttcttttcttttttttgagacagagtttcgctcttgttgcctaggctggagtgcaatggcgtgatctcggctcaccgcaacctccgcctcccgggtcctggttcaagcagttctcctgcctcagcctcctgagtagctgggattacaggcacatgccaccacgctcagctaatttttgtatttttagtagagatggggtttcaccatgttggccaggctgctttcaaactcctgacctcgtgatccgcctgcttcggcctcccaaaatactgggattacaggtgtgagccaccgcaccctgcctaatgtccctaaatatttaatggtttttaaaaaatttattgtgtatggcagcacagcacacttgtaggaattagtatcaacagtacatcttgcgttttttaagatgctgcattttttaacattttgtaataaaattatgcgtatcaaaaaaacaaagaaattccgtgtgtagttcacactcacagcacatctccgtccaggcacttgagagaatgactaggaggggttcttggaggaggtggtctttgaacggagaatccatcttcaaggattctgtctgtaatggtcaccaagtatttcctgagtcacttccatgtgtcctgcagttctctgaaggggcgtgggacctaccgatgccaattatccagcattatctccagattccaagaagttggggtgtgagccagcaatcagtacagaaaagagataccaaaataagtttgagttggggagtgttccttcaacttcagttttctggaagagatcttttttttttttttgagacagagtttcgctcttattgcccaagctggagtgcagtggcacgatctcggctcaccgcaacctcctcctcccgggttcaagcgattctcctccctcagccttctgagtagctgggattacagacatgcacctgtaatttctactaaaaatacaaaaattagccgggcgtggtggcgcacgcctgtaatctcagctactggggaggctgaggcaggagaatcgcttgaaaccaggaggcggagattgtaccaagatagtttgttccagctaaacaacctggcgctagtgcaggaaaaggtggaaggcacggggctagcacaggagggttcaatattttcaaccttatcaagccatattttggcaactcttgtttttcacgagaagcccccgctgggcttgtcccagcgctgtcctgaggcttcccccatgagttccgatagggcagaggccgccctgagcgtttctctttcccctggtccaagagtggctcaaaagaaggatttttgactggaattggccactttgtgttactttttgacccttgacctcgccccaaagggggatgcgggggaggggctctggtaggggtggccccgctccttccaggtccgcaagcccaggttcccgcccaccgggctcagcccaccctgcggccgttcagggaggccgttggcacccgtgacctacgacccccttcccgagccccaccgaggtcacagccgtggcctcgtctccccatgcctgcttcccgccccctgcccgtgacgggcgtctccgaggaccaatgagcgcgctgtatccacccctcgggcggggccaagcgccgaccaatcgccgctcgggcgcccggccgggtccaaacgctccaatcgtcagcggcggcggggcgggcagagggccggggatggcaggttcaaccaacgggtgggcacgtcgtcctcgcgaggaggcgtgccctgcggccgggcgtgcggtgtccgcggcggcgcagggagggggagggaggtaaacaagatggcggcggcgtgtcgggcgcggaagggggaggcggcccggggcgcccgcgagtgaggcgcggggcggcgaagggagcgcgggtggcggcacttgctgccgcggccttggatgggctgggcccccctcgccgctccgcctcctccacacgcgcggcggccgcggcgagggggacgcgccgcccggggcccggcaccttcgggaaccccccggcccggagcctgcggcctgcgccgcctcggccgccgggagccccgtggagcccccgccgccgcgccgccccgcggaccggacgctgagggcactcggggcggggcgcgcgctcgggcagacgtttgcggggaggggggcgcctgccgggccccggcgaccaccttgggggtcgcgggccggctcggggggcgcccagtgcgggccctcgcgggcgccgggcagcgaccagccctgagcggagctgttggccgcggcgggaggcctcccggacgcccccagccccccgaacgctcgcccgggccggcgggagtcggcgccccccgggaggtccgctcggtcgtccgcggcggagcgtttgctcctgggacaggcggtgggaccggggcgtcgccggagacgcccccagcgaagttgggctctccaggtgtgggggtcccggggggtagcgacgtcgcggacccggcctgtgggatgggcggcccggagaagactgcgctcggccgtgttcatacttgtccgtgggcctgaggtccccggaggatgacctagcactgaaaagccccggccggcctccccagggtccccgaggacgaagttgaccctgaccgggccgtctcccagttctgaggcccgggtcccactggaactcgcgtctgagccgccgtcccggacccccggtgcccgccggtccgcagaccctgcaccgggcttggactcgcagccgggactgacgtgtagaacaatcgtttctgttggaagaagggtttttcccttccttttggggtttttgttgccttttttttttcttttttctttgtaaaattttggagaagggaagtcggaacacaaggaaggaccgctcacccgcggactcagggctggcggcgggactccaggaccctgggtccagcatggaggtggtggacccgcagcagctgggcatgttcacggagggcgagctgatgtcggtgggtatggacacgttcatccaccgcatcgactccaccgaggtcatctaccagccgcgccgcaagcgggccaagctcatcggcaagtacctgatgggggacctgctgggggaaggctcttacggcaaggtgaaggaggtgctggactcggagacgctgtgcaggagggccgtcaagatcctcaagaagaagaagttgcgaaggatccccaacggggaggccaacgtgaagaagtaagtatggcttgctggggtcggggccgggccgggccagtcacggtgctgatggttctgtcttccttccttctctcctccctccctcccttacttcctcttaacaccctgagctggacccgtctggcgcctgtgtcctccgtgccagggagagcgtggttgggggcctgcgttacggactttcactcaggcaaggccagttgtcgcagcggggcgtgcgtttgcatgggctcttggactccagttaaaatgccctggtagcgaaaccctcctgagaagggagcggcccccaatcccctaagactagccccttggctcccccagctgtccaaggagcagaggcgcccagtggaatcagcctgtgtttgtttgggccccgagagtttgtgtgcggccgccaacacgttttctgcgcagtgtgtggccgttaccggggccaggcgaaatgtgatttgtttatcctgtcagaggggaaccctgggctgccaaaaataactgtttgcaccggcttatcagtcagcaggagggaaacgtagcctttcctcatttgccagggatgtgacgctggaagcatccctggcccccggggctggaagccctgcccgagggggactgtgcctccctcccgaattgcatccggaagaccttacttttccaactgacttcttcaggcacggggctgccgctgggcatcccggacgcctctgcatctgtgcgcggagaagctcctacctagggcagcactggccggcctgagcctctcccagctggtgggggtggccgggggtgtccctgccttatcgcagccagacacgctgcacctgccgccgcctggcgggccctgcccaggccctgctcctttcccagccttcttaactttcaaaactttgcctcctgtttccaagaaaggaccttatctgctgggctaggcctcgagggactggcaaggacaccctgcgcagggcaccatgaccttggaaggaggtccggggaggggctgctgcggtgtctgctctcaccttcctcctgctcaggggccctggggctcctgccgtgtctgctctcacctctctcctgctcaggggccctggggctcacgtacatttttttttttttttttttgagacggagtctcgctctgttccccaggctggagtgcagtggcgcgaactgggctcactgcaagctccgcctcccgggttcatgccattctcctgcctcagcctcccgagtagctgggactacaggcacccgccaccacgcccggccaattttttgtatttttcagtagagacggggtttcaccgtgttagccaggatggtctcaatctcctgacctcgtgatccgcccgcctcggcctcccaaagtgctggtactacaggcgtgagtcaacgcgtgcggcctttttttttttttttttttttttttttgagacggagtttcactcttgttgctcaggctggagtgcagtggagtggtcttggctcactgcaatctccgccccctgggttcaagtgattctcgtgcctcagcctcccgagtagctgggattacaggtgcctgccacagtgcccagctaattttttttttttttttttagtagagacggggtttcaccatcttggccaggttggtcttgaacttctgacctcgtgatccacctgcctcagcctcccaaagtgctgggattaaaggcgtgagccaccgcgcccggccagcacgcttcttaatcagcatgcaggctgtgacatgcggaaaccaggggcacaggctctgaagtttgtactctggagctggagcagtcagggttaaatgggagcggctgggaagggtgtgtttccacgaggcctttctgatgtctcagtgcccagtctggacccgggtagaaggtgtggccagtgccttgagtcagtggagcagttgcctgtgcctggtctctgtgagatgggttggtcaggggctaggcagagcctgtgcctggtctctgtgagatgggttggtcaggggctaggcagagcctgtgctgggggtagcaggtgccctctaaaggggcc[139 bp omitted]catggtgaaaccccatctctactaaaaatacaaaagttagccgagtgtggtggcgtgtgcctgtaatcccagctactcgggaggctgaggcagaacattgctggagcctgggaggcggagcttgcggtgacccgagatcgcaccattgcgctccagcctgggcgacacagcgagactctgtctcaaaaataaataaataaataaataaataaataaataaataaataaatctggcttgagttttgacaaatgtatatgcagggtcaatgggaagacagacgctggagggtggaagcctgactgtgagagtgagccccctgctttcctgaacagtcagtggaggaggtcctgggagctcaggtgagcacctgaacggtagggcagagcctgagggtcttggtggagacaggcaagaaggttgcaggaacctagtctggcccagtgcctgggagaacgggagggaacacggaggcagggaggcagaggggttggcaggacctggactggactgtgcgtcgcagctacccacagcttgaccccactgccttgaagtgagtgatgcaccctcactagtgttcagcgtccaatttcatcctggccctgagtgtgtaacggctttgcccttgcggggccccctgggatgaggggtgagccctgtcccttcctggtcactgtctgccatcaggagctgccccgcttacagctgtgattcaggagccactgcatttcctccagccccctgggtgctgccagggggtcctcctattctgggagctggtgtgttctgactggaggctgccatgtgcagagtgctgtcaaggagaaggggtgtccactgcccagccctgaggcccaaggccttggccagccttgctgccagcgctgcagggaaaaagcctcctttgtgtgtgggaagtttaataaactccgctcagattgtgtctcgcagcgagtgtctggaaccttccagacaagcctcaggcgtccggtcctccagttggtgtggaaagcgtgggcgatcaccaaggggggtgggttggggcagatggagccggcgtgagtcccgtctcttcccttccttcccagaaaggcagccctggagtccatgccttgtcccgctctcaccggcaaaaagtataatcttattagaaataggaaagttccaaaaagcatcaatgagttaaaaagagggctgggcatgttcggtcatgcctgtaatcccagcactttgggaggccaaggcgggtggatcacccgaggttgggagttagcctgaccaacatggtgaaaccctgtctctactaaaaatacaaaattagctgagtgtggtggcgcacgcctgtaatcccagctactctggaggctgaggcaggagaatcacttgaacccgggaagcagaggttgcggtgagccaagaccatgccattgcactccagcctgggt[145 bp omitted]ccctctctctactaaaaatagaaaaactagccaggtgtggtggcacatgccaataatcccagctacttcatctgaggtcaggagttcaagaccagcctggccaatatggcgaaactccgtctctactacaaatacaaaaattagccaggcgtggtggcgcgcgcctgtagtccagctactggggaagctgaagcaaggagaatcgcttgaacctgggaggcggaggttgcggtgagccgagatcgcatcattgcattccaggctgggcaagcctaggagagaagagcgaaattgtgtctcaaaaaaacaattaattaaaataaaatcagtgccataggctgtttctggtaggcagtgggttcctagggtggagcagggaagggctggaaagggtcgcctgtgcccagcccgactccccgtgcttctcgggggacagcacggctagctgctgctgcggagcccacagtggggttctgggggggggggtgcaggcagaaggccgccatgcctccctccccctttccaccccagtgagagtgggctcgaaggcagggagtctgcccgccttgtggagcctccgcagaggcacccagggctgccgtgagcgcacagcctggcggtgtcccacggccctgccctttcctgtcacttccacctgttgcaaaacactgtgctttcgtatcttttctttctacctgtttggaaatgtgaaaatcactgctgccgtaggaaacgggcccagatccgggctgtggctctcccatccgcaccgcccccgcggtgtccagccaggaggtgggaggtgggcggcactcagtgtgcctggttgcggcgatgattggcagatgcttggacctatggtaaagaggattttcgcgagctgggagtcagtcctggactttgtaggtctttacatcccaggcggcctttatggggttccagcatctgctgaggcccctgcgccagccatgtgaggcctgggtgtcctcgaggcctctgtttgtgcccctctctgggcagcgggagggagagctctgagacccagagggagctcaggggctgggcagccgcagaacagcgggggtaatgggtccactgggggttctgggctgtgcacacagtgggcttccggtgcccagccagctggggcaggcctggaatgttggttcctctctcaggatctggggcgctgctgtagctgtcggggaatcagtgaggcggctggacggcccgtatatcccacaaacgccaccgtattgctcaaactggactcaattttcttaacacctttttttttttttttttttttttttttggagacagggtctcactgtatcgccgaggctggagtgcagtggcgcaatcatagctctgggctcaggtgaccctcctgcccccaaggtagctgggactgcagatgtgcaccaccacacccgactagttttttgtagagatggggtttcgccatgttgtccaggctggtctcaaactcctagactcaagctatccgcctgcctgggcctcccagagtgctgggattacaggtatgagccactgcttcgccacgttcacctttatttacttatttatttatttttgagacggagtctcgctctgtcccccaggctggagtgctgtggcacgatcttggctcactgcaagctccgcttcagcctc[133 bp omitted]ggcctcccaaagtcctgggattacaggcttgagtcactgtgcccggcccacctttttattttttattttatagagacaagggcttgctgtgttgcccaggctggtcttgaacccctgaccttaagtaatcctctctggcctcccaaagtgctgggattacaggtgtaagccatagtactgggcctaaagttcaccttttttttttttttttttttttttg[132 bp omitted]cacc[137 bp omitted]acccggcaaagttcacctttttaaagtgtgtaattcagtggcatatagtacattgacagagttgcacaactatcacctctatcagcttccagaacattcttgttaccccagaaggaaaccccgtctctgtcagccatcactccccattccctccccagtcccggcacccacgcattcccttcctgcctctggattggcctgtcctgaacatttcacacgagtggtgtcacacaccgcgtggccttttgcgtccggcttgtctcacggagtgtgctgtcctcaaggggcatccgcgccgtggcctgggtccgaacctctctgctgttcacggctgcgtcactttccagtgtgtggagggccacgctgcgtttgactgctcatctgtggctggacacttgggctgctcccgcctctgcctgtgaattgtggctgctttggtgcacgtgtgctcagccggcgtccctctagaatccttgagggccttgtttcagccacatcaggagggattcagggaccagggcacgcgggtctggagctgggtgttcctgggtctccatgtgcctcccagtcctgctctgagccgtgggaggccggggcgagggccaggcccatctcttccctgtatgatctgtttctaggcagacggaggctcctagccccacctctctgtgagcttgagtggcgtttatgactctccttcctatttcctgtcctgctaatcaacaagtcagctaaacagtccatgctgcctgggcaagcccagtaggcccctaacgtggcacctcggagcggctggcgatgccccaagagccgggcttccccctcctggaggctcttcctgttcctcgccaagctcttaggtttcgctgggcctcctcttctgctctttttctggctggagacgtcagaggaagcctggcgatctagagaagctgatgtgcacccatcatcccggaggtgactgccaccaggcgggggtggctccacccccactcctcccctggcataaatcgggggacgcacgtgcctgcgcagaatgccttggtcccttttaattaaacagacaacccagtgtcccttggtctatgctgacctgctcaggagtgcctgggctcttccacgtttcagctgctgtgtgtcctgctgctgtgaagtgtccccgttgaggtggaggcagggcagggcgccttcggtgagggcgagtcctcctgtgcccgtttccccatctgtagaatgatggctcatggaggagacatggtgtcggcaggtggtggccggcgcagggaggtttccaggagggagtcctccaccctcatttgcttttagggccgtgcagcctcccgagcggcccccacgaggctctgaggctgcatgcaggttgagctcctggcctcactgcccctcctcagggttaggactgtgctggagcctgggtgggtgtggggtggtccctgcacaggcagcaggaggtgggccagagcggtgctggacctgaaggcccgtggctccctcagctccactgaggaggctggaatagtgtcctgggccaccttccctgccggtagccggctcctgctgagggagggggtgctttcgcctcctggtggagcatcaggctcttggggcctgtgcgtccgagcatctggcctctgctgtctgaaaacagcaccttccccgccccccggccaccgcatctcctctgaatagaaggcaagtcttgcctcccaggaatggcctgtgaccttcatcagcgggggaggttaggggcacacagagccctggggaacaaggggatctggggctgagccgggcctctcgggcccaccccgagctctcctgagcagcctggcaggcaggaaggcgctgggccccggggcctttgccgagcccagcctcaccctcagcgtccccctcaatgccctgggtgcctgccaggctgtggacacaggccctggccagttctataaataaccttgccgggccctgctgggaattggtgccaccaccacatagcccagagagaacggaaacacagggcttctcagcgagcagaccaggcctgcggtgaccagtggaagtgggggacgctttcagggctgggcagcccgacagggcaccgggcacagccaggggccggaaccagttgctcactggctccgcttctgggggactgtgtccctctgtgccccgtccccatcacaccttgctttcccttcatcctgctctcctagcccctccccagactggcggccccttgtccaggcccagccccagcacagcctgcagccctggcagagctcaggccttggccttctgaggttgccctgagggcagtgagcaatgagccctgggactggtgcactgggagggaaaggtgagccaaggcttcctgcaagaggcagccctgagctgggggtggggaaggctgggtcgtgggatacccctgacaccccaagttttttttttgagatggagtcttgctctgtcacccaggctggagtgcagtggtgagatctcgactctctgcaacctccgcctcccaggttcaagcgattctcctgcctcagcctcctgagtagctgggattacaggcgcccatcaccacgcccggctaatttttgtatttttagtagagacaaggtttcaccatgttggccaggctggtttcgaactcctgacctcaggtgatccacctcggcctcccatagtgtcgggattacaggcgtgagtcaccgcgcctggccccccagctgttttttatgctccatgcttgggcttcctgttaagaattaaaaaagaaaaaaaaaactatggagatggaatttacatactgtacaactcattcgttcacagtgtacaattcagtggcattaagtacattcacacggctgtgcaaccactacttctaattccagaacgttcggtcaccccaaaagcaagccccattcccattgtgtcactctccatcccctccaccagctcctggccactctgaatccacttcctggctctggattggcttgtcctggatattgcatagaaatgggatcctgtcggccgggcgcggtgactcacgagagcaagagatccagaccatcctggccaacatggtgaaaccccatctctactaaaaatacaaaaattagctgggcgtggttgcgggcacctgtagtcccagcgactcaggggctgagtcaggagaaatcgcttgaacccgggaggcagaggttgcagtgagctgagatcatgccattgcactctggcctggcgacagagtgagactccgtctccaaaaaaaaaaaaacaagaaatgggatcctgtcatcccagcgttttccgaggccgaggtgggcagatgacttgagcctagtagttcaaacgagaccagcctgggcagcacggtgaaactgtctctactaaaatacaaaaattagctgggcatggtagcacacgtctgtagtcccagctacttgcggggctgagatgggaggatcgcttgagcctgggaggtgcactccagcctgggcgacagggaaaccctgtctcaaaaaaaaaaaaaaaagtgcatcacacactgtgtgtcctttagtgtctcactgtgacatcctcaaggtgcagctaggctgtggctcgagtcagagcctcactggtttttgtggctgagtcttgttgagtgcgtggatgggctgtgctgatcctcgtctgtggaagggcccctgggtggttccacatctcggctgctgtgcgtcctgctgctgtgagcatctcgtgctccgtttctgcgtggcgtgtactgttcctcagggtgtgtacctgggagtggagctgctggctcacagggtaacagacctttggagaagctgcagacgcttccacgcccacccactgggtgtgaggaccttgctcctcgtcatttttgtttttgtttaattttttcttttatgagacagggtcttattctgttgtccaggctggagtgcagtagcacgatcacaggtaactacaggctcaagtgatcctcccacctgagcctcccgagtagctaggacttgaggcacgtacctccacacctggctaatttttgtatttttagtagagacagggtttcgccgtgttgctcaggctggtctcgaactcctgagctcaggtgatccacccgcctcggcctcctatagtgctgggagaaatgaagtgtctgcgacagggcggcagctgcagagggggctgtgctctctggcctgttgtgccccacccttgtgacaggcaggtgggcgtggccaactgggcggcagctgcagagggggcagtgacaggcgggtgggtgtggcaggaccccacaatgtctctttctgtggcgtctccttcttcgcctgccccttcctatgggccatccttccagctcacctgcggcccaccctccaaggagtgggaccctcggagttgggagcccttggctgcgtgggactgtactgtgtgacggagccatcaccagggctccaactcaccctggctcctgccacagtctgggctccatctgtgctaccattgcagtagtctggtttctaggaagcaaaactgttactgagttacaaagctcaattaagagtgtcctttgggaggccgaggcgggcggatcacaaggtcaggagatcgagaccatcctggccaacatggtgaaaccctgtctgtactaaaatacaaaaaaattagccggctgtggtgacacgtgcctgtagtcccagctactcgggaggctgaggcagggaaatcacttgaacctgggaggcagaggttgcagtgagctgagatcgggccaccgtgctccagcctagggacagagcaagactctgtctcagaaaaaaaaaaaagtgtcctaactgtgtcctccaaagccctcgccggccgatgacagactagagggcgctgtgctcccaccccctaccgccctgagcctggacgcgtggcccctgcagggccctttcccacagcactgtgaactcacagcttctctctagggaagggaggaggtacgccacttccacagggagatggggaggccgactccagggatccaggccatcatcctgacgttgggtcggctgatacacccctgtcctctctgtcccagggaaattcaactactgaggaggttacggcacaaaaatgtcatccagctggtggatgtgttatacaacgaagagaagcagaaaatatatcctttccggtgttgggaccgcggggcctccgtgggaggggctggggccctgggtccgcctgcctcgaggcctgctcctcttcccgtctccttgaaggagactggcacacgagggccgtggccttccctggttccccggaagtcagccattgtggcaatggctgcgcagcttgctgaaaggggccctgagccctggcccctgtgtcttgggcccgtggggtgtcaagtcccttttttctcagagtctcctcccaggctaaccaggggtgtagccacggtctgcctgagacaggccacgcgggctgaccgttgtgggccattttggtcgtggctgggcgtgtcctcgtgtcatctgtggacacccccatgggtcttacgggcacagcctccctacggggactttgcttcctaaggccctgtgcccagagcaagagccagaagtggtcctgaggctggggctgtgttccctgagccacgcggtcaggggccctgggaccgtcctgcatgggcccgagcctgcttgggggggcgtccaggaggcaccatcccccgcccatgggcagggtgggggacgtgagccccgcaggaacgctgccccaagagtcagccctgtcctccccttccccgtaggctccttcctcctgggacgctggggcccctgggccttttcagaggggtggctgagggcagggtgggccctggtcccgaggaggggcaaggtgggtgcagagggtccctccagagccccttttctggcccccgtgctccctgggcctgtgagtggggccgccccctgagctgtgtgtccttagcgccccacgtatatggtgatggagtactgcgtgtgtggcatgcaggaaatgctggacagcgtgccggagaagcgtttcccagtgtgccaggcccacgggtgcgtgcgcggggcaggggccagggtggggcgggggccgggggccaggcagggcaggctcctttccgtgaggccacactgcttgtcctgatattcattgacatgaaggcccaagtttttttgtttttttgtttttttgtgttttttttcgagatggagtctcactctgtcgcccaggctggagtgcaatggtgcgatctcggctcactgcaagctccgcctccgaggttcacgccattcttctgcctc[134 bp omitted]agcctcccaaagtgctgggattacaggcatgagctaccacgcccggccttgtaaaggcccaagtttttaaaaacagttttggggtcccccatgtgtggcatccacaggcagggctgctgccaacctcccgcctccatctttgctgggcctgctgcctgaggccagtggcctgcttccagcccatcgctggcagccgcctgccctgaccagatctcctggatgcaggtctgtggcctcagagtcagggccccttgctgctgcaggaccacaggggcagggaggggcctgctgttccagcaagactttggggtgcagccggcctgtggcccacaggaaaatgagacctgtggacatccggggccctgccagacgtggctcggccggacgagggtggccactgcaggcgcaggtgtggctccctgctggacctagcctttcctctgtcctgtgtgcctggacttctgtgacttcccagctgggcctgtggtgtttgggaggctcccaggcagctgcaaaggggacccctgtgaggggcagggaggcctcggccccaggacgggtgtgtgctgcccgcaggtacttctgtcagctgattgacggcctggagtacctgcatagccagggcattgtgcacaaggacatcaagccggggaacctgctgctcaccaccggtggcaccctcaaaatctccgacctgggcgtggccgaggtaggcacgtgctagggggggccctggggcgccccctcccgggcactccctgagggctgcacggcaccgccacaggcactgcacccgttcgcggcggacgacacctgccggaccagccagggctccccggctttccagccgcccgagattgccaacggcctggacaccttctccggcttcaaggtggacatctggtcggctggggtcaccctgtaagtgccccgcccccccgggcactcaccacacgcacactccgaggggcctctgcgtcttgggcagctgccggcctgtgggcgcagggcgtggccaccggcccagaccctctctggccacagccgctagggggtgcttactttatggaaatgtaactcatacggcagatggtggttcacccgtgtgaagtgcagcctggcccgtcagggatcttcacagagtggcacggccgaccctcctcccagagccccacagggaagctgggcgggtgacagcagctccaggccccttccccgggtgggtccagaggacactcccctcctaccccgtagcctccactagtggaaggtggtgaagacagaggtgtccttgagtccacagggcctctggtccagcagccacgggacgcctctgtccctggggtagagctggggctcctagggcgtcaaccaccttgactgaccacgcctttcttccctcccctcgaaatgaagctacaacatcaccacgggtctgtaccccttcgaaggggacaacatctacaagttgtttgagaacatcgggaaggggagctacgccatcccgggcgactgtggccccccgctctctgacctgctgaaaggtgggagcctcatccctctgcccgcagccccagggaggcggggcttttgtgcagaaatgtagggttgggggtgtcaggtggggggctattggccccgagaccccagcaggcattgagaggactgagtggagaggccgacctccccgcagggcctggtttgccaggtccctcagctccaccctgcttctgggccctgttcaccctccgaactcccaccccagagggcagtgctgccctgcgcctcccccagccccaccctcgggggctccctggcttgcagggtctgtcagggttgtcctgctgcacttcctacgcatggcagcaggtggcactggccgtccgtccatctgcccagtggccttgggagaacggaaccgccctggccgtccagcccagccctgtctccctgccagccgcgcacaggctgtccccggcatgtcccaggagtggagtggcctctgtcagggagaccgcctgtgcgcggggtcccccttaggagcgtccaggtatcacccagggcctgacaacagaggctgggcaggcggggacggttggtggggtctcaggcctgtgcccagctgacaggctcctcgccggcttctcctcagggatgcttgagtacgaaccggccaagaggttctccatccggcagatccggcagcacaggtgagcggcccctgggggcagtggggccgaggctgcagggaggccggccatgtgggcagctggttgagcgggcgctagagcagggcgtggtgggggtgccaggctgggctggggccagaccccgtgcagcgcccgcagttctcggggcccgagtggggtctctgggcagtgtcctgttaccggccagacccaggcgccttgtccgaactggggtctgagtgaggacatgcgtccgtccctgccctaggcatggagatgcgccaggaagggcacagctggtcccaaacactggcgagagcctctctttttcccctcctcctggggctcccagcagcagggtgtggctgggatccagcccagggcccccagctccatgacagggaagacagagcagcggacggggtcagcaggccccacagtgccgcctccctcacttcgtgggctctgctcctctgcaccagcccctggaggcccttgagccgtctgctggagcccctccgagccccgaggccacccactgagaccggctctgggagtgggagtgtccggacccctgaggcgctggtgctgattgtgccttgggggtctctgcacagctcgggtcatctgggcgcctggcggggactggggctgccccccgatagcctcctgggctgggatgtgctcagggccccccagacccccttctggcctttgctggctttgcagccagcatccatctggtgggtgctggcttctgagtgccacctgggacacaggcctcagggtggaggggacatctgtcaggcttggagtcaggtcagcctgcctgctcctagaggacatggctgagcttctgtggtcacagccaccccttgcacggcctggtcccagctcctgagtgtgtggcaggtaccctgggcccagaggagctgggtcggaaaactggaccgccctggtgccagcctgacaggcgccactgcttctgggcgtttgcagctggttccggaagaaacatcctccggctgaagcaccagtgcccatcccaccgagcccagacaccaaggaccggtggcgcagcatgactgtggtgccgtacttggaggacctgcacggcgcggacgaggacgaggacctcttcgacatcgaggatgacatcatctacactcaggacttcacggtgcccggtgagtctggcgggggcccctgcccggctctgctgactcggccaggatgtcccacgggagcagggtgcctgcctgtctgcaacaaggacagcttctgccctctggtggccaatcccacgtccccaaagcctccagcccacctgcaggctgcctccgccctgcgggccgctgggacatggctgaaaggtgtggggtcagcgggggcaccagcccaggcctgtctggccaggagggttcctcaggcgtctctccgggtgctgcccagccaggcaccacccaccggccttggcctgagtcccagcaggagcaggcgggggagccccagggtcgggggagggtaggtgagagtcagggtgcagggtggcccctcagacagctggcatgagagagggtccagtggccctccctcccgtcgtccctgaggcctgcccgctggccctgatgccggccgcccttcttccctaggtggcgaggaggcgtctgaggcagggcttagagcggagcgcggcttgcagaagagcgagggctcagacctttcaggagaggaagcctctcggccggcgccgcagtagtgcctgaggaggagctcagggccttagcgtaggggcggcccacattggcagccagcccctccccgccatgctcccggcttggctgtgttcggcccagggctgggccgtgtcataaagagttttgcagtgtatctgcagggtggatgcttgctgcgctcgggctggagcctgagggggctttctgctttactgtttcagcgggaagtggtgggcaggggccggcctgagaaggggggtacgccaggcaggttgggatgtgaggacccagtgcacagggtccacccccgggcccgagggtcccagaatagtgggggccctgcagagagccccccattaggtccctcagcactcctgggcccctcatcaaacccctaggctcagctcagtagctggtccccaggagagtacagtgtgggggcccccgagagcacagtgtatgggggtccccggggggtacagtgtctgggggccccccaggaggatgcagcatgtgggggccccccaggagggtacagcgtgtgtggggcccccaggatcacagggtctcagctcctgggctcttggatttgcagcaccacgaccatcgcgtctggtctgttggaacgggaggtgctgctgggtaccctggtcactagggtgtgctgggaggtgggggcccctcatggtgcccatccttggggcctggctgcaatttgaccccaggcccagggtcttctgcctttcagagccctggtgccctgagacgggcagccaggcaaatcccaggcaggagggccagttagggcagggccagcccaggcaggttgcgagagtccctactgggacgtggaccacacgctgacccccacggccgcccctgcaggccaggatccctgagccaggacccggcactggcttccctcctggggaccctcaggcctgtgtgagacctgggctgccctggggtgaggtgcctgggaggagagcaggggctgggccacctttttcatgaccctgctaagcccactgtgggtggtgaggaggagtacccagcagggggaagggccgccagaccactcggcatggctgaggcctcagtactcagtactgggtactcaggtggacgcccctcccactgctcagatgctggggacaggctcaacttcaggcttcagcgtgagccccgtccctgacctgcagagcccccttgcgttggggcaggacagcccggcgccctcgggtcaggccatcctctgcgctctgccggggctgctgcatcggcctctgcgtgcctccactttggcctcacgtgtccctacccaggatgcgggtcctgctgccaacacccagatcccagggaaggggcttgggctagatcctgggcaccagtgcagacaggagtgtggggtggggcaagggcccagtggcggctgtgcccgctgatgcagagctggggcaccttgtccacagggtctgccccaccagagacgggctgggcccaagctcagacctatgggtgcaattggtgcctcctcaccaaggtcttttttatctttttttttttttggagacagagtcttgctctgtcgcccaggctggagtgctgtggtgcgatctcggctcactgcaacctccacctcccggattcaagcaattctgcctcagcctcctgagtagctgggattacaagtgcgcgccagcatgcccggctaatttttgtatgtttagtagagacgggggtttcaccatgttggtcaggctggtctcaaactcctaacctcatgatctgcccacctcggcctcccaaagtgctgggattacaagcgtgagccaccgcgaccggcccaaggtgcttttttaaagctagtgacttcctgtgcacatggggtgggtgtgtggcaagttctggaagctgctgagtcagccactggtccattctcggagctggggctctgcactgggcacatgagctctggggcagcccggggcggcctcccactgacttcgcccgggaggggcctcggggatggctcggcagccagtgtgttcgcggagtcctcgccaaccaccacggctcctcgcagggacagtacgtgggcagcttcctgcactttcccctgccattgtgagaacagtgtccacctgggcagggtgggcagccccaggcctgtgggtttcaccagggtgctggtgatggttggtggctagcagggactgggggcagctgggggccctggcaggctgagctctgctccccgcgtggttctgtgctggcatttcgcgtgcctggcctgagcctggcccgagcctggccctcctgtgtcctcacagatgagcatgtggcggctcctgggcctctagaaccaaccatgggccagggtgccccaggggagcacgggagggtcctgccttgtcagcttgcctcctactcgtgaggttcctgcagtcagtacctgggtggggtcccacctgcggccatggcaggtgcaacagacgtggtggaggggacactcctgcccaggccatctgcgggaggctcagccccggggggtgcctcccagagctgctggggggcagcatttcaggctggatacacctgggcctgacccgggggcgggcatggcctgggcagcagctgtaagtgcgtccccgtggtgggggccagccaggtccctgtggctctggggttgcgcccctcagctcaggccacacttgccgtctccctcccaggacaggtcccagaagaggaggccagtcacaatggacagcgccggggcctccccaaggccgtgtgtatgaacggcacagaggcggcgcagctgagcaccaaatccagggcggagggccgggcccccaaccctgcccgcaaggcctgctccgccagcagcaagatccgccggctgtcggcctgcaagcagcagtgaggctggccgcctgcaggtggggcgcggcggggcccgggtggggcatgtggggacaacgcctggatgccacagccagccgtgagcatagcccgcgctagtcagtcatggtgaccgtcacgtggctgcgcgtggttgccatgtggcctttgggtggcttggccacgtagcgatccccgtggagggtgccgtctcggggcctggtgtctggccagcgtgctggtcatggaggcctacgtgtggcggggctctgggggggcgtgccgtcctcacagccacctctcagagtgggtgcattccgaggaccctgccctgggcctggcgccccctccccatgcccgcgccgcttccaggaaaggcttatgctgggctcagcccagaggcttttgagcaccagtgggtggtgggtggtggggaggggccgcggcctccatggctctgccggggtgccgcaggctctgagccagctgccaagtatggctgaggctgagtcgtgccggacgctgccctgtctctccctgtgtgcctgcctcctctcccagccccagccccagccccgggtgggagacggagtcccagaggtgtcagagacccttaagtcacctgccgaggatgcggggtggatgggggcccgaggctgaagcccctgccttgccacagcccctctcccaggttttgggggccaccgcctgagttacatgtctgtcccccaaatgggtgcccacagcccatccaccagcgtcagagcccgccaggccccactgcaaaaggccacacaatgtaccccgggagtgactcaagggtggccttccctggcctcccctgctgccccccaggagtccggtagccccatgactgtacctcagcttctccatcctcccaggggcccgcgggaggcggagaaccggtgcccaggctgacctcttccgtcttccttccaccctgcagcccgtgtccaggagccccgccaggtgcccgcgccaggccctcagtcttcctgccggttccgcccgccctcccggagaggtggccgccatgcttctgtgccgaccacgccccaggacctccggagcgccctgcagggccgggcagggggacagcagggaccgggcgcagccctcccccctcggccgcccggcagtgcacgcggcttgttgacttcgcagccccgggcggagccttcccgggcgggcgtgggaggagggaggcggcctccatgcactttatgtggagactactggccccgcccgtggcctcgtgctccgcagggcgcccagcgccgtccggcggccccgccgcagaccagctggcgggtgtggagaccaggctcctgaccccgccatgcatgcagcgccacctggaagccgcgcggccgctttggttttttgtttggttggttccattttctttttttctttttttttttaagaaaaaataaaaggtggatttgagctgtggctgtgaggggtgtttgggagctgctgggtggcaggggggctgtggggtcgggctcacgtcgcggccgcctttgcgctctcgggtcaccctgctttggcggcccggccggagggcaggaccctcacctctcccccaaggccactgcgctcttgggaccccagagaaaacccggagcaagcaggagtgtgcggtcaatatttatatcatccagaaaagaaaaacacgagaaacgccatcgcgggatggtgcagacgcggcggggactcggagggtgccgtgcgggcgaggccgcccaaatttggcaataaataaagcttgggaagcttggacctggccgtctgggttttgttcgcgtctcaacgtggatggggcggcagcggggcgggcgccgttgacatgcggagggcagtggggactcggggcgcgggagggccggggccggctccctcagggccggcggcagcagcggtggcggcgcggttattgctcggaggcggcgcgggctgccgccagcacacgccgcagtgaggtaaacggtctcggaggtcggcagtcacggtgttgagccgcctcccggcccagggcggcgaactcgtctgcgaccgttagcgccccgcggcccccgcccgggcgagctcgcgcacgcgcccggcacgcggcggctccatcgggcccagtgggctgcgcgaccctcgggtggcgggccctgcgactaagcggccgccccgtccgggactgagggcgagtgatcgttgtcctcaggagcccgaagctgagagccgttcacgccccttccttcccgcccagccggggtctccgcggcccgcgcctcacgacgcccagcacccggcaagcaccggaaagagcagtgcacacttcggcggcgcgagggcggccggggctctgcgcctgcgccctgaagcggcgagcgcgcctccgtcgcccggcgcgtgcgcgaagggcccgcggtccccgcgcattcgcgtcggggcgtcgcgcccccacgtctctcccgccgccgaggccccgtgcggcgccggagaagctgccagagagatgggcccaggacgcgggacttaggccgggctgtggtcgggggacgtgggggcggcggcgaccaacgcgggagtcgccacgacgggctcggcgaggcgcggcggaaagagtctctcgtcgaggccagccgccagcttgtccagcaccgacccggatggtaggacgcacaggcccgagccggggcaccccccgccgcccggctcctcctcgatgacggggatggcggggtcgtcgccggcgccgcccagggtgcgaccgtcgggcgggccgtccacgctgtcgccgcgccgcaagggcgcacgcgcgggtcgggccgcgccggcaggcggtgccggggttccggccagggccggggccgcgcgggcgccggggtcgctgtgctgccggccacgctgccactgtttgcgggcgtgcgggtgcgcgcgggcgcggtgtcgcgcggcagccggcgtgtcgtcgaagtgcgggtcgtggcgcaggaactcgtggaacagcgcgtccgtcttctcgtcgatgctgtagtcgcggcgcgggcggcggggccaggcgcgcgggctgcggggccgggcgggcgcggcaggtggctcggtgtcgtcgcctgcgccgcggccctcgatgctggcgtagccactgtccatctgcagcagccggcgcgcctcgccgtccttgggccgcggcgcgggcggggagggcggcgggaaggcgggcgccgcgcccccggagcctgagcccgagctgtcgccgctgcgcaccgagtcgcggtcgttgccgctgctgctgtggtccgaggcggccgcatgcagctcaagcgaggcgcgcaggctccacaggtcgcggtagctggtctgggcctgctcggggcccgcgtcccgctcggcgtccggctccagtggcggctgctgctgctcaggccccgcgctgcccgcgccgcgctccgggggggaatcggggctcgctcctcccgctgcctcggccgcctctagcctgcaagccaggccgcgccgtcagagccccgccgagccccgcgccccctacccggccggccatcccgcctctggatcagggagggtggacgcgggtgggacttgggactcgggcgggccttggaaggtgagagctttaaaatgagccagtgtgttttgcaggggatgcgtcttgcattgaccctgagctgtggcgcctgcttattaagcagggtgcctccatgctggactgcagacggcggggccccctcccttggaagcccccaggaaaagtcaacatgcttctctccgggagtcacgttttcccagcctcccagtggacgtgggagccgcaggggatggactggacgcggttgagtccagctcagcccctgctccaggctagggctctctgcccacccatgctggataaccagcaggaggacagtgcacagacgtgagggtcacccgccataccagggctgccccaggaaccctgctctgccccagccccacgccccattcccatcccaccgacgtgggccctgggcttcagggaagttgcccttgggttgggggaggggtgctgctggccggagtggtcacagcagcttctgagaggagtctgcccagccttgggagcatgggcggggcgggggtgggagagggcctgggaccacagcagaacccttcaggcctcggactccaccagcaagcagcagtaccagcgccatcctcggggggcccctcctccccacccaccgccctacccttacccagtctctccctgcttccctcctctggtccatgctggagaggtggccccagtgagtccgcctctgggaggggccttgccgctggaggcaggcgagcgcgtgtccacggggcctggagagcgctccctgggccgcctaggggggggcgaaggggggcaagggcccacaggtccacccctagcacctccatctactgaaaaatacctgccgagagcagggggcgggctggccagaaaggggcgggggtgcgggaaggccacggcgtcgcccgcccgggcaatgtactggatgaagtcctcctggggggcatccccctcctcctgctccgtgctctcactggctgcccgctgccgctggaagtggtgccgcttgggggaacctgcgcacgggatgtgccgtaagcgtcagccggcatgtgcctccacccgctccacacacacacagaatgcctatgcccccccgccacacacacacaatgcctgtgcccccccgccacacacaacgcctgtggacccccaccacacacacacaacgtgtgccccccacacatacaacgcctgggccccccccacacacagaacgcctgtggcccccatacacacacatagaacgcctgtgccccccaccacagaacgcctgtggccccctcacacacacacgcctgtgccccccccacagaacgcctgtgcaccccccatgcctgtgccccccccacagaatgcctgtaccctcctacacacagaacacctgtggcccccacacacacacaacgcgtgtgccctgtctctgtctcacacacacaggagtgggccctggcttgggccagaccctggctggcatctccccgggtcaggtgggtgcggacagtggctgtgtgtacaccctggagtacaggtgagaaaactgaggcacggagggaagaggtgctgggaccagagagcctgagcagggcagggccaggaagcgagtgagtggaagggcctctggcaccgatagtgccttgtggcagccctggtcaacatgtggccactcataagggcgtgtcctggacacctggtggcctgcacagcctggctgaaactacggaaggcatgagagagtcacatacaggctggtgggggccaacgaggagagggagagaggtgccctctcctgccagctccaccctggtctggagagcgctgggggactgccccacccctgcctcggcccccttctcccaacagcctccccagcaaagcttgagtgggcaggccccagcaaacaggttctgggatgtgctgcaaccacattggactctaaatgtctctagtcacccctgggccccattcatttcaagatctggattctctcagctggagcggggcagccagaggaggccttcccctccctggcccctagctaccttgggggtgggggctgggagaactcaccccacccccgctggctggagccacaacacagggtctcccactgtctgatgatgtgtcctctgtcatgctgacagcaccttctctctgcacttgtcccctatcctggcctcacctgacgacaggacctgccaccctgtccacaaggcagagcgggccccagcccctctgggctgccctggccctgctgagctggctgagcagggctggtgcctgctgccagtgctacagatgggacacctctgctccccacacaaactcctgcctcgagcccagataaggcagccctgtctccaggatcctgcctgacccaaggcctgcagaattgaagggctactgtcaaacagtccagggatctatgtgctacagcccagagggcaaaagcaccccctgccccggagcttcggtaagttttactggcacacagccacgtgcattcgtcatgcagcgcctctgactgcttcctcgcctcaacagcagcagagttgtggagacacagcctctctgaccataaccccacgaacaccaccatccggggcctgatgggaaaagtctgctgacccctggcccagtccaacacttacttcgtgttagaggaagtcagagcccagacaggcagagggcctcggccaaggtcacacagcagctgatggtctgccagcgggcgagggaggggccccgggggaacccgccttccactcacattcccagggatgagagccgagcatggctgggaggggatgcaggccacaggccccaccctctgcgctccacagtgaccaggtggcccccgacaccctcctttaccacctcatcctggatgccccaatggcccgagagcagtcggggcgcgcaaagccttcccgcacaggttcccggagctgggtgggtctggctcaggccgcccgcacactcagccctcccagccacctgcagaacctcaggcagcacgcccgctggcagactgggcaggactcagccccagagcaccggctccccacccagcccacaacctcctgctcctggatgtccagggcagcccctggcagccagcacccagcccacaggggcccactctccaccaggtgctacagctcacctctcgtgtccagactggctgcccgctggctgggctccagcttccacttcttgaccttgaaataggggctggccccatccaggctggcatggcggcgcaggcgggtgaggaactgcagaacggtacctgccccggatcccgggcccgcctccccaggccctgctgcagccccgggccctccagccttggtgctcctggtaccggcatccaactggcagggaacagagatggcgctcaggctaagacttcttcctgggcccgtgtgctggccccaggtggccgtaggtctgagagacagtcccaagggccccccatcactgggacagagaggggtacctgctcggagaggggcagaagcgggaggaggggcgctcagtggctgggtgggctacactaaggtgctctgccctctggggaaggtccctggatatggggtttggagagaaaaggaggtgcgtgtctagaaggtctctcgcccacggcgtgggctgcaggtgagggagggcaggggtggcgcaccctctccagaacctagggaatgtcaaatgaggtgggagcctggggtgccccctgcatgtgtgaggacacgcctgtgtccggtgtgcggccggctccctctttctcccgtgtgcaatgacccggcgggccaaggagggctgcggtggctggcaggtcataggttgaccttggtcctggactggggacagggaggggaaggagcctccccggctgtggacaccatgggggacacgcaggggccctcaccgaggtgccttccccagagtcgctagatgccgaggggctgatctctgcgaagtcagtggcgcccgcggctgagttgtaggggtcacctggcagggcggagctggggcccacagagcggccggtgagggccttccccgggggctgtgggacagagccaggtgggggaggaagcagtgacaggtcaaagagcatgggtgggtgagggacatgggcaggtgaggagcatgctgggcttggccccctgccctgctccaccccaccccgcccatcccgagatgagggccacccagaaaaagagtgggtgagggcgtgggggtccgggagtccccggggctgcctcccgtcccccgaggaaccggggctgctgcccataggctcacctggaagatggccagagtggccttgggagaggtggccgggtggggcgtggtggctgagctggcctcgcctgagtcacactcgtggatggtgacaatcttgaggggcggcaggtgcaggtgcgtgagccgggcattcttcaggtggtggaagtccccctccgtcagtgtgtacctgcgacagcatctggccatcagagcccgcccacctcccatgcccgatgccccagctgccgtgctctgccatccaccctgccggcctgggcaggggcaggcgaaaggggggcaactggccaaggccgccccaccccacggtcccagtccaggagcctctgccttggtccctgcagcctccgcacccagctcctcccccgtcccggcggccaggacctcagacaggccctggggtgcctcccaacgccgccccgcttaccggcgacccttgtcctgcgtcttgcggctctgctcaaacagcgccgcctcattgaaggagacccggcggcccgtggagctggtggacaggaagcgttcggtctccgcatcctggcactcggggtcctctccccggaagtcggggtctgcgtggagaggcaggagagggtgggccccgggcgggccacgccaggcgcctggtcccgggagggctgctcctccgggcggccacggcagggagggctggggccgcggcacgggcggccgggctggcggggcgagggacactcgtccatccgctcacacactcactcgctcagcacgcgcctgggcccacctacgcctgggcgttaaggaaacagagatgagtcggaatcgagctgcgcccagtctggtgggggagacagacagacacagacggtcaggcagcccgagggggcggcgggtggccgaggggcggatggacaggcgagcgcacagccaggctggccagcacctcaccttgggctgggtgggtgccgttgtccaggtaggtggtggtggtcttctccgcttcctccatggccctgggagagacgttgggagagcccagtggcacggagggcccagatagccacagtgggtctcggctctttgccccaagccaagccctgcgcatcacccagtctccagaggcatagcccaccctgtgactcagaagccagtgaggtagaccccccaccacccgatggcacccacaaccaccatgcacctgcccagccgaggtgggggcctcgcacctgttgaggcgctggtggacgtcccagcagcgcttgcagaggagcaggacgccagacaacaccaccagcgtgccccccacgaacagcgacatcaccaccaccagcagcacgtagttgtccaggatggggtctggctctgcctgcgggtgtgcagggggggtcaggtgctgctggcctggacgacctcctgcccctcccacctgtcccctgcacccaccgtggggcgtccagtggcattgtcccacgacgtcgtcagggctactgtggcagtggtggtggtggtggtggtggcggctgtggccatggtggctgtgggctgcattctgaactggggaggagggccctgtggggaggaagcctggtcagctccagctagacctacttctcctgcaggagccactgcagacaagctgggtcttccctgcaggagcaggagcccacacagggggcagtgactcatggagaggtagcagagccggaggcagcctccacccggcttggctctgcccagcgggccccgggggctctctctggacctccatctcccatccccatggcgggggaggaggcctggccctctgagggtgcgcctgtacccatcacaactgcacacagccggtgcggcctgtcctgcaaggtagcgccaggccctggagctcagcgctgggcagggcaagcactcggaggaatggggacgccaaggcggtgcagccggctcgagaaggactccagacgccctgtccgccccatcacgggggtggggggctacccccaccccaagaagttcagctacaccctggcagggcccacccggccatggttgggtagagggagacctcccgctgcctgcgcgccagggagggtgcaggggctgggcgcgtgctcccgggtcacgactccgggaggtggaggtctccccggtgctgagtgctggtgggagtgcaagggacaaagaaggcgcatctgttcccagccccggagaagctggttcccatggcgactgcggagcaggccgcggctgggggggcgggttgccagggagcggcggggagggggcgcgggggcggcggcctgggggggggcggcggcctcgggggggcgggcgcgaagccgcaagatggccgcggccgcctccccgccgtgcccagcccgggcgcccggagcatccccggccgccttacgctcgggggaaactgaggcggggcgcggcaccagggaaaggagccgcctggacgctgtgcggcgcagccgggtggggaggcccgggaatcgcagggggtcggggctggcgccggggtgctcggcggccccaggtcagcaccgcacgcgcgagacctttcccggagcgagaggagcgcacaggcggcagccgctcctgcccttcccggacttccgcccacacgcgacagcgggaaactgaggcccaaagccgggcagggtcccggcgggggctggtgtcctcagcgctcccggtcacaggctgcccgggccctggtactgggggaaggggccgcatatgtaggtcgggaaatgagttcaggctggagggggtggggacaggcgcaggatggtgaccggaggccggggaagatggcaggaggccgaggggaagaggggggctcctgggggaggcggctgcgggagccgagggcggaggttccccacggggcagcaccgcgcccccgagccggccaagggtggggatggcgagccaggggaggcagggacccgacgccagggctgagccgagacgccatcgtcctcgcccgacctcacagggagaaactgaggctggggcggggcctgagcgggggtccctctggaggcagccgggtggggggcgcaaggcccggatctcggtccccacgcccgccggactcctccgcgccctccctccggccgcttagcccacagccggctgcgatccccggcctgtcccccgtccgccccccgcagccccgagcccgccgcgcctacctcagcgccgggacgagcggcccatgggcggcgggctggcggcgggcggctgcgtggcgctcgcggctggctccggcgcccggtggccgcggagcaggcggagaatttatgaatggagagcgcggcgcgggggaggccggcgcgagaggaggggccgcgcacgtgaccgcgttggcggcgcgcccgctccgcgcgcccggtgctgcccggtccccggcccgccgcccccgctgcgctcgccgctgggtctggctggctccgcgccggccaccgcctccccttcccttccggcggggcggggggcggagcctgcgctcccgggcgcccactccgcacgcggagccgccccccgcacccgccgcggcggccgagccccgcccccggcccatcggcacgattcacctcgcccggtcctgaggtcccagggacgcagctgggggtgtcctggaattcacgactctgcagcccgaggtgcgccgcgtgcgcaggagggggtggggtccgggggggcacggactcccctctcacgttgcttggtccgtgggggttctggggcggcacagccagggcccctcggccacaattcccctttaagctgcacagcccagggtctctggacacaggcgccccgcctgcttccccacgcaggtcccctctggcactgtggaggactcgccatgcctctcctgccccctcccctgtgtgacagcgatcacagaccccggcacaaagctgagcagagcccatcggggcccaaacgtgcactcacagaggcctgctcctcgtggggtgacatcagaacgacacccgcagaaacccaaagcccaaagctgcccccgcttctccctcttagaccatcgaacctcatcctgcagatactcaggccacacacctgccaccagcctggcccgagcgccaccccaacccctctgagcccacgcctaacaccccacagcgcctcctctttctcgtcccaaagaaaggctgacaccgctctggcacgtggctggcccagctcagcctccccgcctctgcccttgcaggtgccctgtacccaggcctctgtccatgcagccagagattcaccccggtttccttcaactccttccccagcttcacagtctcggcgcttctgctcttggcttccagcccatgcctgggtcccctcctctgctacgtccctccaaggccctatgccttgcgccttgcctgttcctgtgtgctgtggggccaccactccgatagctgtgaactccaagggcagccccagggaacctggtgccaggcaaatgggaattgcatgggcaaaggttttgaggcaaaaaagtttgcaagtcaatgcctgtgaaggaagcagagaaatcgtcttgttcccagcaggaccatgacatgggcaggcttcagggttttttgtatttcggttttgctttttggagagacagagtctcgcactgtcgcccaggctggagtgcagtggtgtgatcacggctcactgcaacctccacctcccggattcaagcaattttccagcctcagcccggaaggtagttgggactacaggtgcgcgccatcatgcccagctaatttttgttttgtttttttttgtagagatggaatcttgctatgttgtccgggctggtctcgaacttctgggctcaagagatccttctgtctcagtctcctaaattgttgggactacaggtgtgagcccccacaccccgccaggtttctgatttttaataaagactccctctggctgtgtgaagaaaaggtacctgtactaaacggggggaggctggggcctcctaggcaagagatggtagccgcggtggccatgctgggtgcacaggccgggacagggcggaattccagaggaaccccaggtttggggctggagtaatggcgccctcacccgtgggcgaccctggagtggggactggagggaagtggttccacgagtgagactgagtctattaggcctcccagtttcctggagtggcagctggatatgcggtcctgagagccaggaggtgcacaggtcacgactcgaaaagtgaacaggcctcctcctctgcaccccccgagccagggccaggatgaccaggctccaagtgaccgtcacagcgctggcccggtgggaggagccaggcccacgccttcatcctgagtcggaccagcagggccttcttcaggtgcttgggttccaggggacagtggcgcccgccattgcactggcctgaacacgggcagggggcgagggtgcagcctccggatgtagggagccacggatcgtgtcggattcgcccacagcaggaggcattggatctccctggctgcacccttgtaaagccacagccccagggcctcccctgctccctgcacccctggggtccagcccaccgcgccaggctcaaggccctttccagggagcccgagccccaacccccgccatccccgattccgcattttcccggagcctaaggagcggggctgggggcccggccgggtgccgcagacctgcgtgagcgcgggggcggggcggtgacgtcatagccgcgagcgaggctgcgcgggccgctggctgacggcagcggagccccgagccgcccgcgcacgcgctcctgcgtcagaggcgcacgggggcgacggccaggcaggaggtggggggtcggcgagcgcatctccgggcgcggagcgccctctgccggcgtcgaggagcagcgcgccggggtccgggatccccagcgagccctcccgcgtcgcccgcgctgtgcccctcgccgcggtcgccgtttcctagaacagctgcacctgcagccttccaccctgtcccgtcctgcacactttctcggcttttactgtgatttatttttggcttttgccaccacctaccactacgacctg[132 bp omitted]tcctgcctcagcctcccgagtagctgggattacaggcgcccaccaccatgctcggctaatttttgtatatttagtagagacgaggtttcgccatgttgaccaggctggtttcaaactcctgacctcaggtgatccgcctgcctcgccctccagatcggataaagtgctggaattacaggcgtgagccaccgcgcccggcctgacctgcttattaatgatctcaaatgtctgctaaataacccccggccccagagtgggattctcactctgttgcccaggctaggcagtggcgcaatgatagctcactgcagcctcaatctccttaggcccaagcgatgctcccgcctcagcctccccagtagctgggaccacaggcgtgcatcaccacgcccggctaattttgattatttgtagagacggggtctccctctgttgcccagactggtctccatctcctggggtcaagtgattctcctgccttggcctctcaaggtgctgggattacaggttggagccaccacacctggcccagagccggaaacttgatgttttcttgatgtctatccagggccctgcatccaatgagcgccccaaaaatctttttttttttttttgtacagacgggtcgggggtgggggcgatctacactattgcccaggctggtttccagctcctggcctcaagtgatcctctggcctcagcctcctaaagcgctggtattacagtcgtgagccaccacgcagccgaatcttgaatttcactgaagttcgttttactccacctcccaggacggtttcaccgcccttatctgaccaccccctggttctgccgcagcccgggccggaacaaaactgcaacccccagaatacctcacgacggggcactgcgtcgtcaacgtcgcgtgcgccctgccgggagtcgtagttcgcgcttgcgctctcgccgggactcctcctcccagacgtccctgcgcgtcgtcctcctcgccctccaggccgcccgcgccgcgccggagtccgctgtccgccagctacccgcttcctgccgcccgccgctgccatgctgcccgccgcgctgctccgccgcccgggacttggccgcctcgtccgccacgcccgtgcctatgccgaggccgccgccgccccggctgccgcctctggccccaaccagatgtccttcaccttcgcctctcccacgcaggttcgggcgctgcgggtcgggaccctccgtggccgccgcccccggagtccagggtccccacccccagggcgcgacccccgcttccgggcccccggacccgcgcgccccggaagccgaggctactcagccctggaccctcggccctgcctctgctgcccgagccctgcgctgccctcgtcccgggcacctccccgagataagcgtctcctgggtgccctccccgatctccctggccaaagcctgggtgtcgccggatcgttgcattcccatttcgcggatcagtagaatgaggcgcaactgttgaggaccaaagctgcaacttcggatccctgcgctgggttgtctcagtgcctcacatcagcgccaggtcctgccctgacccattacttagcaggacaggccgagtgcccggtgggcgcggggccggcctgccccgccatcattccccacgctgttgtctgcaggtgttcttcaacggtgccaacgtccggcaggtggacgtgcccacgctgaccggagccttcggcatcctggcggcccacgtgcccacgctgcaggtcctgcggccggggctggtcgtggtgcatgcagaggacggcaccacctccaaatactttggtgagtccggtggagggctgcagggccaggccaggctggggctccacatcccaggtcagtctccgtct[133 bp omitted]tgt[213 bp omitted]gaggagattgtgccactgcactccagcctgggcaacaagagtgaaactccatctcaaataagaaaaatacagttttagcaggtttgtccactgaggagcctgggctggccggtgatgaaagcgaaccagaggggaccctgctctcagccggtttatgactggctctggaccaaccaatgtaggatggtcgaagcaagagatgtaaaaccacccaggcccagtggttcatgcctgtaatctcagcactttgggagactgaagtgggagaatcgcttaagcccaggagtttgagactagccttggcaacatagtgagaccctgtctctacaaaaaataaaaagaaactgaccaggcgaggctgggtgcggtggctcacacctgtaatcctagcactttggaaggccggggtgggagggtctcttgagcccaggagtttgagaccagcctgggcaacatagtgaaatcccatactacaaaaaattagctggttgtagtggtgcacacctgtagtcccagctactcgggaggctgaagcaagaggaccgcttcagccggggaagtcaaggctgcagtgagccaagatcatgccactgcacttcagcctgagcaacaagagtgagaccctgtgccaaaaaaacccctcaaaaaaccatgttgggagggctgatcagattaggggaggaaggtcatttgtgcaggaaaaaaagcagttctaagcctcactggtttccagtggtggccagatttgaactcagcttgcctttggccctgaccccagctcaacccatgggtggtgggtcagagggagggcctctgtccccaggcagtgcttttgggggttcctccagcttctagtcctttcttgcggcccctgttttgttcttctctagcagttgcccgccatgttgggcccagggccagtcctgtgggtctgtttgcacactcaggacacagacttggatgtttgtggagctcctggttcacagggggctctggacttgaccaggggagtccctgaggctgtgcagccctttggggtctcacgccttccccccgccccattcccccagtgagcagcggttccatcgcagtgaacgccgactcttcggtgcagttgttggccgaagaggccgtgacgctggacatgttggacctgggggtgagtgtcagaggggacctgaggctcagcaggttggagctgtccaggctgcgggggagggagcgctgggggaccaggagccgggctggggtcgctgctggcccctcaccgcccctcaaccccttgcaggcagccaaggcaaacttggagaaggcccaggcggagctggtggggacagctgacgaggccacgcgggcagagatccagatccgaatcgaggccaacgaggccctggtgaaggccctggagtaggcggtgcgtacccggtgtcccgaggcccggccaggggctgggcagggatgccaggtgggcccagccagctcctggggtcccggccacctggggaagccgcgcctgccaaggaggccaccagagggcagtgcaggcttctgcctgggccccaggccctgcctgtgttgaaagctctggggactgggccagggaagctcctcctcagctttgagctgtggctgccacccatggggctctccttccgcctctcaagatccccccagcctgacgggccgcttaccatcccctctgccctgcagagccagccgccaaggttgacctcagcttcggagccacctctggatgaactgcccccagcccccgccccattaaagacccggaagcctgactgtgtgctcggctcttgttcctccacctggcccggtgaagccgggagcgtcctgggcccctgctcacgtcctccatgtcccttgcaaatagggcctttgagctcccctggactatgtcccttagggcacctggaggtccgtaggaagcaggctcgagggggtgggtggggtgcagccaggcgggcaggctgctgaccttcaccctacaacggtggggagggtgaaggtcaccagtgatggggacatcggtcagggaggggtgtccctgctgctcctggcgcctctgccgagttcctggtctccaggccttgaccctgagccctgctggcccttggccctgcccaccagcctctggaaagaggcgggccccacccgctcccacgctggccccgccctgtgccagccggtcctgtgggtggccctgcctggccgggtgccgaatctgcagtgtttttggcacctccgtgggcacctaggcttctgggttggccccagatggagtggggtgggcccaggagggggcggctccctggcactgccccgttgggcctgcctcttctcctttccataaccctgggggcgggcaacactggctccagctggtgtgtggacggcgggggctggggtctcctgacctcctcccttccttgggacagggccctgtgcagtggggtaggcagggaattccaggggggtgagtggggagggtgggcctgcctgtgtcactggagctgggatggtgacagagaggccgccccgggcctgtcagcacggacgggcagctcactcccacgtcatggcactatgcgggtgacttgccacagcttcacttgaggcgaggtgccgttgggggccttgcgactctgaggccgccggtcagcagatcaggtattctggaacagcccacggtcccctgcctggctccccctccacttgggcctcgggacacgagtgaccaggcccccacttctccaggaatccgcagcccagggaaggttgtgtcagccaccaggccacaggagcagcctctgcccaggccccccctcccccccgcccccagttccagccccaggtcttcaagttcctgccaggccaccaggaccctataaataagaccaagggcacagctgggacttagcaggggcccagcgggaggagctgctcactccggggacctcccctgcccccaccaccagggagggtgtgaaccttggagccaggcctcaggacacccgagacacctgacactcggagggaacagcccgtgctggctggatgcgtcctggagcaggaggcagtcagggtggggccgggaaccaggcggtcaaggcccttcagtgagggcagcccctggcttagtgaggcagaacagagcacagggtttgtccccatcacacccaggaacaacccactcaaccatggggacgccgagtatgggaaatggtggggaagcgttttagcatgtttattcatttagactggctctgggcatctggtccccaaagggccacacagtggcccctgtgaagcccagcaagttccgacaacccgtgtcccattccactcccgaccagactgaggtgatggtgtccattccactcccgaccagactgaggtgacggtgtccattccactcccgaccagactgaggtgacggtgtccattccactcccgaccagactgaggtgacggtgtgcaggtggcagagccacacacgagaggcaagaggcagggagggaggtgggggctgctggccactcacagggggccccagtgtcctgcttgggctgctcatttggcaccagtccacggctccctccgccacctttgttctcactggaagcagaatgagcctggccctgtagttcccacctggggccccagcccttcatccaagccccattcatcgaccctgcccctcctccctccaactgggtccagttcactaagctcccagaactgctcaagccattcccacttcctggaccatcgtcttttttttttttttttttttttttttttgagaggagtttcgctcttattgcccaggctggagtgcaatggcacaatctcagctcaccacaatctccgtctcccgggttcgagcaatgctcccgcctcagcctcccaagtagctgagattacaggcgcacatcaccacgcctggctaatttttgtgtttttagtacagacagggtttcaccatgttgatcaggctggtctcgaactcctgacctcgtgatccgcccgcctcggcctcccaaagtgccaggattacaggcatgagccaccgcgcccggccttttttttttttttttttttttttgagacggaatctcgttttgtcgctcaggctggagtgccctggcacgatctgggtttattgtaacctccgcctcccgcgttcaagcgattctcctgcctcagcctcctgagtagctgggactacagacacatgccaccatgcccagctaatttttgtatttttagtagagacagg[148 bp omitted]accgcagcccctgtgacccccttccaagggttatcccagcctctccctctctggcctagccctgacccttcggggctgggtgtgcctgtcaaggtgggggccacggctgccgggagcatgggtggcagccggaaggagacctggggaggagcgcagccctgggaggggcgcccatggccagggtgggggtggaggtggtcaggccagataaagggaggggccagatgagtggacaggaggtgctcccgtaggaatggggtccccttctctaaatagaggggcaggacggggcccacctcaaccaggaccatcctcaaaaagccgacggggaagggtgagatgcacaccacattcgtgtctcattggctgtggcctcagtttcttcatctgtaaaatggggtaatgcccaccccaaaggctgggaaccagtgcatgtcctgcattaatggggggtgatggccccaaagtgatcctgccgcatcccctcaccacactcccacccaccctggagaaactgaggcttggagaggccagttacctcccggggtcacagcatagccggctggtgactggctgggcacaaggcaggcctggcactggctaatcgctccataaatgccctctgaggtcaccattgacagatgcaggaggccagggctggccagggcacccccactctacggcaggtgactccagcctgttttcctggacgacagccgctgactcaggcccctcttcccgtcccccccacgcgggcgcccccaggcggaagcaccgggcctggggcgacaggaagggggcggggcagcgagtcgcgctgtacaccccaaaaccctgtcccgctgacgattcggggtgcatctcagcccgcggcgaggcgggccgagacccttggctcggggcattcaaggggagtccccccatgaactgcgccaagcctgggtcccgggtggcccagccgtcaaggcgccccagggccagggccggcaggcaggggcgggggccagtctgcgtcaccgcccgcccggccccccgcccccctgcccgccctaactccaccccgagggaaggcggcgcggataaaggctgagggccgcgcgcttggcccagaccggcccggccagcgcgcattcggccccggacgaaggtactcgcagcacttggagcgcagaaccggccgcgcccggtgagtgtggaggggggggacctgcgggccgaggaagggtgcccactctagatggctcaggatgcccgcacttttctttgttcttgggacaggagggatcggggagcctccggtcctgggaagccccccggggtgcggggtgggaggggctccgcgcagccagcgccgccctggccggacctcagcccccgccccgccccccggggcactcccccttcaccgcgggtgaccttgaactggttgccgttccgccctccgttgcccagccacacggtcccagtctcccgactacagtctttcgttcccgatcggggttcctcccccgcgcgcagcccagtcgtcttcctcccctgccaggggcagcgcggcgccccctccccgggactccgggcggcgctcccaggcgggcccggcagagggcgcgcccgagctgctgactcaccgcatccccgagcgcgcgcgggcgcagccggggacgccgcgtcacgtcacggctcgagcgggcgcgcctcggggaaacgggttctgcccgcggccggcgggtgggcgcgcggggcccccggcggcagccacccggccacgtcaccgaggtgcgggcgccccgccccggccacaactccgcccccacgcaccacgccctccccggggccgcggccctagcctcaccgtcgcccgcccgccccgggaccccggccacgaggcgcggacttcgcgctcccgcttccgctcgcggcttttcccggacgaaggcggcggggtggccccacgacttcctgcccctcccggcgccgggaacaatggcccgcgccccctcccgctcccggccgctcccttgggatcgcgaggggtaccagacccgtctccagacctgggtcccgcgccccccggggcgcgcccgccctttgttgcgggctccgggcgcttatgaatggctgcgggcgcgggcggggcgggggcgggcgcggagaggcgccagccccgcccccgctgcgctccccttggtcgcctgggcgctgggggcggggcgagggggcgggcccggctgccacgtggggcggtgccgcggcggctctcataggcccgggctcgcggccgactgggcgctcggcgcgcggcgattggccggcgcccggccggcggagtaagtagtgaatgggagggggcggcggccccgccccctggaacgttgatacattataacttttttttcttgttactttcacccccagatcctccgagcggcggcgacggctgttgctaagggaggggacgcgcgaggaagcgcgacccgggcggcagacggcacccagcgccaccagccgagcggcgccccctccccaggacccttaaccgcgccgcgtcccggtcgcgcccgccgccctttgaaggagaagcaagtgccgtccccacccccggaaggcgcccccaggagccggagcgacctcggagcgccactcggattttggatttcggtctcgcattccgcggccgggactttctcgaggaggacgcgcgctgctccgcgcccccgagtgcccggaggacccggcatccggggagcctctcgcccctgtcccggaggcgcggcgaggattggcggcgcccgccgcccccagccccccagcgcgcgccggggatggagccgcagcccggcggcgcccggagctgccggcgcggggcccccggcggcgcctgcgagctgggcccggcggccgaggcggcgcccatgagcctcgccatccacagcaccacgggcacccgctacgacctggccgtgccgcccgacgagacggtggaggggctgcgcaagcggttgtcccagcgcctcaaagtgcccaaggagcgcctggctcttctccacaaagacacgtaggtaccgcgcgcccccggccggccgccccctcgggccccggcccccgggcgggaacaaagagcgcgccgcgcggggaaggcagggggcggccagacagggggcgggggcgcgccgcgcgctctcgggcgccctctgctcggcctcgcctgcctcggccccctcccccgcccggggtcgccgcacaaaggcggctgcgagggcgtcccgggccgggcttcggcggccccccttgggggcgggcaggaatcccagggcgttgcgggggtcccggctgcgggtgtgggggccgccaccgccccctcccgcctgcgtccgcgccggcttccgcatctgctcggcggcctcctctgcgtctggctgtctccccccacttgcgtctctctccccccctttgttctcgcctccgagcgctccccgcagcctcccctcccccctggtatttaaatcgcctgcaggcccggagccctccccccgcgggcctccggggacacgcagtgtccatcccagtggaggggcccatcgggggaggggcggagggggagggtctcctttgtctgcgcggcggcggccgcctgcgccggggagggaggaggagggggagcccggcccggcgcaacccccagggcctctcctcgggccgaaacccgtggttcctacaaagaggagccaggactagaattagggaattgggggcaggggctgccctggggtcgtgggggaaggtggcatagagcacactggggcccagaggaggagaaagtgcctggttggggtgcagagggggtgccagagtccagggcgggggttccactggagggaaggggtccgaatcgccaggatggggctcccagcaccagacggagacctctctgcacgcgcttagggccctggatctggaagccgggaaggggtgggggtgggaacttatccgtctctccccacacaagcacagccctcccccgcggcctctgcttccgcgtccctgtgtcgtctccgcggagtctcatgctcttccttcctccccccagccggctcagttcggggaagctgcaggagttcggcgtgggtgatggcagcaagctgaccttggtacccaccgtggaagcgggcctcatggtaaatggccatggggctgcgtgcccccagaggcccccgcacacaggcagtagcccctccctcggtacctgtccgcacacacactacctggggcccccaccccgccagccagcagggccctctccaccccctattccagcccaggattccgaccccacactcaggcccctctcctccctctctttgtagtctcaggcctcaaggccggaacagtccgtgatgcaagctctcgagagtctcacggagacgcaggtaagacctcgccagccccttcctaacagggcagccctgggagcagggtgccttggccaccgacggggcctgggggttgtctgtgctcccaggaggctgggggaggggaggggacgcgccaccccgcctgggtgccagcctggcctggcctccccacctcctctcccccaagattcaccacctgacccggagggctttctctcccacggtggctgccctgggggaagggggcctggctttcacaagactgcctgcaggatgaccttggcctatggggcctcatccccgctcacaccctggcctgcatccccagccccctccgcccccaccgaggagcccccctccagccgctgtggcttccccagagcgagtttctccttttttacatttctgctgagggctgggggtggcggcttgggtgacactccttccgccttccgtgacccccatcgtgagagggtggggatctcgtcaccctcccctcctctctctggcctttgttctctaccccgaaaggggagggggcgggggtgcccagccctggggccagtgaggcctagacaggatgttaggaaaatatttagtaagcggccaggagggaggctggggctggccctcacccggttcccggttttgctgcggacttttttttttttttctccttctttcctcattttcttggctgcggccaagccttcctcagacaagggccctggccacctcccaggagggtgacacaggcctcagcaatccgcccgctgccagggtgggggacgcaggctgccacccgccccagcaaggggtggccggcttcccgggcctccctggccccgaggcccgcacccccttccgctttcccagcggcatgtagagtcctgccctttccctacatcgcgggggcagggcgggggccgggagctgggtggtctgccatgggggtggccacagcagcagcagcagtggcgtgggggcagagccggggtcccgagccagggcgggggctgcaggtgatttcctggggcgagtgtgagcagagctccccgccgctggggggctgcggttggcagggggcccagggcgtgttggcttcacaccctcctccctgggcgcctgcgtcaggaaggagctgggttggggggggctggagggggtgctgggcggagacactgggctccccagggttgcttccctgcctggcaccgagtcatgcccgcccattagccttccccagggaggaagttgcagggcgggtggtggtggggactccagctgctctcgggaagccaccccgggcccttcctgcaaaggctgtcttggggcaggggggtagggggccgggcaggctgggccgcagggtgggggcttcaccctgccctcctccctgcctccctccccatgggccccaagcagagaaggttacgccagctactgccagtggagaggagagccgggagggagagctgggaggcggtcggttctgagtcatcccagcctatgtcacttctcagaaacctccgccacccccccccccatcccggccactggggagagcagggctctggcccatacccagagcagggggcttggcgaggacagggtgagattcaacccacacccaccctgaacgggggcagattgagggtttctgtgcttggagcaggttgtgccctccgggactccagccccagggcggtcagggccccttcctgcagccttgccacagccccctaggcctccgccccgcccaggacagataaatatttatcttgagaaagcaaaggttaggacagaagaattcgtgcaggaattccacccacttgctggccctggtgacttagctgggagggggcctgaggtggagcccctcccgtatccacaggcagagaggatctaggggcccatgagggtgggggaaaggcaaagtgaaggttgtttgaggtcagtgactgccagctgggccccgccccctctggcctcagtttccccttgcaagaccgacctagttggccagggaggggcaggcccccgtctgacccgcctctgtccccacagcccccagcggcgcccgggccgggccgggctggcggaggaggcttccggaaatacagattcattttatttaagcgtccgtggcaccgacagggaccccagagcccagagaggggcggcgagaggccccaggtcacagcgcggggggactgggccgggctgggctgggggcgccgcaagctggggctcccagctgacggaccgctctccttgcaggtcagtgacttcctgtcgggccgttcgccactgacactggccttgcgtgtgggcgaccacatgatgttcgtgcagctgcagctcgcggcccagcacgctccactgcaacaccgccatgtgctggccgctgcggccgccgccgctgctgcgcggggggaccccagcatagcctcccccgtgtcctcgccctgccggccggtgtccagtgccgcccgagtccccccggtgcccaccagcccgtcccctgcatctccctcgcccatcacagccggctccttccggtcccacgcagcctccaccacctgcccggaggtgagcctggggaagggaagggtgacccttggttggaatccaaagggtgggccgtcctggggaggtcttggggaggacaaggactcttagtcccaggtgagtcccttgtattaagggctatcctgtgacctcgggctggtgggtgatcccccagcctagattggtggggtatttctagatcctgagttgacggtcatcgcctgacatgacctggaccagtagatgatctcttgatctttgactcatgggtcatctctgtgtcctgggttggttgtgacctcgtgaccttgggctagtttatctctaaaccctgtgttgacaggtcatctcctgacctgggctggtgggtgatctctggtccctgggttgctggtgatcccctgatcctggaccccgtgctcatgtgccccttcctcccatcagcagatggactgctcccccacggccagcagcagtgccagtcctggtgccagcaccacgtctaccccaggggccagccctgccccccgctcccgaaaacccggcgccgtcatcgagagctttgtgaatcacgccccgggggtcttctcagggaccttctctggtaggtgtcacagcacatgtgtgagctcacgtgtgtcccgtgaccctgtgcatttggggtctacatccacccacaggcgactccacatattctgggcatacacaggctgtgtccgtctgctcacttcacatgtcccccaggaatcccccacacacacgcctggccctgcccggggggccgcgggtcaccaggcgcctgcatactggggacgtgtcccgctcccgccccgtggtccctcgtgcacatcagcccacatgtccacgccattgcctgagctcatgagctcacacccgtggacgcccgtcctggacatgcgggactgtgcccgtgccgggcactcacggccacctctgcccgcaggcacgctacaccccaactgccaagacagcagcgggcggccgcggcgtgacatcggcaccatcctgcagatcctgaacgacctcctgagcgccacccggcactaccagggcatgcccccttcgctggcccagctccgctgccacgcccagtgctccccggcctcaccggcccccgacctggcccccagaactacctcctgcgagaagctcacggctgccccctcagcctccctgctgcagggccagagccagatccgcatgtgcaagcccccgggtgagtggccaccctcgggggtcctaccttccccgcccgcctgggcttctcaaggcccctctgtgtgagctggtgggctcaggagcagctgacctgcccaggggctgggggggatggcagctgccgtggccactgctctgctccagcccggagagaaggcagcatgtgtgtcagggcacaaagtgtccttgtgtgctcccggggggccacaggcccacttcctcctgccccacccccacccggggcatcatctccagatggcatttggtgcctctgtgaatggccaagtcaggcctggcaggccgaggcggggccagagcccacccctaagcatttcagtgacttggaaaagcagcgaacacaacccccctgccagcctggccccagctactcccaaacggcgggttactccctccagagtctcaccagaagatggctactgtactgcccttgggctctgcaccc[142 bp omitted]tgaaactccgtttccactaaaaatacaaaaaattagccaggcgtggtggtgggcgcctgtagtcccagctactcgggagg[144 bp omitted]cctcggatcacagaagcggccaagccccctccatgtaggactccaggaagaatgaggcaggacagtcctgacctccccagctcatggctgagctggagaattagaagccagctgcgtagctgggactccaggcaaacaccaccatgcccagctaattttgtaatttttgtagaggaggggtctcgctctgtggctcaggcctgtctcgaactcctgaggttgcccaggcctgtctcgaactcctgagctcaagcgattctcctgcctcggcctcccaaagtgctgagattacaggcgtgaaccactgtgcccggcatggtggatgtccttgactgtttcctttgctgacctccctccagggagggcaggactgtgtctgacctcaggggcatttgctggggtctggggtggtcctctgtgttcagcaggtggaggctttgggagtcacaggccactacctcctttgcaggggaccggcttcggcagacagaaaaccgcgccacgcgctgcaaggtggaacggctgcagctgcttctgcagcagaaacggctccgtagaaaggcccggcgggacgcgcggggtccgtaccactggtcacccagccgcaaggccggccgcagcgacagcagtagcagcgggggcggcggcagccccagcgaggcctccggcttgggcctcgacttcgaggactccgtgtggaagccagaagtcaaccctgacatcaagtcagagttcgtggtggcttaggatcttcggatcggccaccctcgcccctcgcaccccagcccagggcggcggggactccgagagccccggagagaacgtggcccagccctggagggcaggcggccactcccccagccagaagtctttttttcttttcttcttttttattatttttttctttttttaaaaagttctgaccgtggtttcctggactcttcatgggctttgcttcctacctccttcacccttcactcctgccctcctcttcctcctcctcctcctcctccgtctgtctcctttcacctctgcgccaggtcggtcctccctgccaaccttccccagctccaatatgtagcagtctctctggatggcggagagtgaaggagacggagaaacgcgccccatcccttccgccgcctcctttcccccccgaccctattcaggttttaagtcaaaaatgtcgatatgtcattatgcactttacagatgaggggaggggccgcagtgcgcagaacccaccccaccccccagtgcagacttcggggtctccaccccaggccagcagcgcccactgggctacagcaagccaacaggtcacagaagccaacgaggggactgtttctcttccactcctatcctcttttcttgatcttttttttgcattttccttcatttctttaacaaggagagcaaagctgttttagcagaggctggggctgaggtccccatggggtttgggtgcaggggcatggcaccctttcctgtcgggaagggagaggggaactacccccccagcctgccctccgccccgccccagccggcggactgtgctgtttcctccgcccccactcccgtgttttctgacctcctgcctgagtttggggtatttatagactattaattttctgactgagccaatagtggttggggaactcttgaaaaaggggagagaatggctgggtgctggggagttcccccctccgagccctccttcccggcccaacctgagggatgtggatttgggactgtctgggggcccctcctgcagcgaggatgggagggggtgctgagctgtgaatcccctgggcagggggcgacaactccgtgtagcattaacccccgtggcggggtccgctgctggtctaatttggaccccctgcctctcagtgcccctgccctaggggtgtctgtctccagaggggagggacaaatcccctactggggccatttcaatggggtagtttttggatttttttccccactcactttttattttttaatgataatggagatgtctggacccttcctcaccccacctgtcggtcttgtcctggctctgcctgtcccccaccgttgttctcgtaggtgaaccccaggtcctcaactccccccctttatgtgttgaaagttaatggtttcagatgtgaacatcacgtgttataactgtagcgctgtaaatttttttgtgggagggtgggcagggaggggtcccagagggtagagctcaaggattttgggttttgttttgttttcatttttccaaaaaaaaaagaaaaaaaaatagaaaaaaaaggagtaaaaggggcgggtttgttttttgaagaactgtcttggatacctatttaaatgtgtgttctgttttgttttttaacgatttttaaataacgtctgtgcctccactggttgagggtggaacctccaggcaggaaccggctcgccaccctctgcccggtaagggctgcccaagaaagcattacccgccctcggggggtcgggctgtgggggtcccggcacctggcgtgagtttcatgtatgaaaacataaaattgaaaaaaaaaaaaaaacctacacgagcaccgtgatttcaagtaataaacagaaaatgaaacacacattgactcccgcctgctcgcctagtggggggatctggccttggttgggagggttcctggggtgggatgtcagctcagggagtcagagggactgacctgggtcccaaggccccgaagagggggtggggcaggggtcagggccctgagaatttcccacgctccttccccggctgccgggtgggcaggaagcagccagggtgggagggaggagcccagccacttcctggtacccaaggccggaagtcccttagggtgtggggcgagggcctgcctgcctgcttcgtggcctgggcaggaccctggccccctcaggacctgccagtatgggggagacgcgaccaccagctctccccagccacaggagtcggggactcccactctgccacacccacctgctccccttcctggagtctcacatctgtgtggcttgctgcagggagatcaccaggccgactgggaggacctaggactccgcagggtaccttgggctggcaggtgatacaggcctggcttgacccagccctggggggcctctctggccacacctcctgacattccagcccttcccagacctggccttcagctccaaacctcccggcctttgccccctgtctaggaacacccctggtccggctgtcccttgctgtctgggaacttccccagcctgcgccttccacccctgtccaccccgtcccgcagaccccacccttccctctctctgtccctagcctggagctccccgtgagcctcaccaggactgagtcctctctggggtcccacctccacccatgtccgggctgggcagagatgaggcaataacactatttcatgtctttttttaaattttgtaacctgtatttcctcaggtaacaagagttgcctatgagaagtaattgggctcccattttatagatgggagaacagaggcccaaagaggaacatcacttggcccagaggatttggggtgtttgttcaatgatgtgacctccaccccttatcccatctctaggggccccagtaccgggagcccccaggggaaggggcacaggttcagagagtggcctgggagcaccttcctgagacccctctgcccctcccaacgcccagtcaaccccaaatcatcgcacgcccacggcaggaaggcggatgcccagtcaggcggcacccaccccccgccccgtccctggtgcggatgtcccctcggggctcagggtgggggtgcgggtcaccgacgccaggcctggggtcaaggcgagggccccagggcgccaccgccccctcgctgggcggggtgggaaggaggaaggaggatgttgtctgaagcacctgctgaatcacaggggctgtgtctgtagcctgcagggtggggggcgcgtcccctgcactccaggacccgcccctcgggatgccgacccccaccccagactggggatcccaggggtcaaggctgtgccctgggggcgtggggtggggtatggagctccaggctcagagccctggcctggtagggtcagcccaaccaggggtgcagcgggcggaggggcggcaggcggaggccaagtgtgcgtagggaagcacggagaggtaaactgaggcacaaagagggcagggaccgctgggatctcgcggggcggggtcggccctggatcgctcccttcccccaaccattgaggaaaaagctgaatgggagggggcggcccccggaaacccgccgggatggaaacgcggtttccagggcaacgcgccgcgaaaggagcctgacgtcaccccgggtagggcgccctgcccgcccccgtccgcgcgtcgcgcggcccaggccccgcccaccagcggggaagcctcattggtgatcgcaccgctcgctcatcggcgtgccccagtagcagcgcgacgaagcctccagaaggcgggacttcagcccggcagcgccgagtgcgcaggcgcaagcgcggaggcgctgcagccccgcctctctccccgcgcgtctgcaaagttgggggcgggaggcgcagccgagggtctgacggctgcggcggggcctggacggaagagggggcgagccccggggcgccgcacgtggacccccggcacgggcacgctcacgtgcacccgtcctttcacgccaacgcgtttcctgctgcccccacccctgcaccactgcacgtcccagaccccggcccagcctccccgcggtccctaggctgggggagctcagacaggaggctaggaggagggggactttggggctgaggctttgccaaaggagcaggagtttgccaagtgttgtaggaagcgggaagggtgcgccaggtagggggcacggcgtgtgccaaggcccggaaacgtgaaaccgagtgcttttcgggggcaaccgggaagtcagttggtggagaaaaatcaaagatgggaggaaaggcgaggctgacaaggaccctaaacggtgattccccaagtcggccactggagggatgacttgggggaccagagaggaagagcaggtgagggggagcggcggccaggacatctgggaggtggctagacccgtggcctggactttggggggcggtcgagttggatcgatgatcgatggggaccctggcggcctcaccctgggggaggtagagacgaaaaaggaactacggtgtgcccggaaggtggtggctttaggtccacagggaggtggttggcaaggcgggggtaacagggggaaggagaaaatctgaaatgccggtgtgagctccgggccaagagagttgaggactcaggaggcaggaatcccccgtggccgcccgctgcttggctgtgggctccaacttggtgtgtgctcagagaaggcagtggttggagtgaacagggcctgtgccaggtggggagactagccaaggtgtttgtgcagcctggcctctggagcggcctgggaagagctggagttcgcagggtgggagctgccctgtggctgggagcccgtgctggcgtccctgccaggcggtgatctcacaggtgagcggtgcttggggagacgcggagctgtgggcgggcaggagaaggtcagtggaggtcatggcttttggcttgaggccggagtcctctgggggtggccgaatgcgcccttggagctgccttgggaggtggctagggtggacagcagtggaagccaggcccttggcttagagccactgggttggagggattgagccagtgcccgggcacagccgcccccacagggccttgccccacccgccctcctctcccagcaccatgggaatgggagttaccgggctggaggctggggacgccaccaccccgtggccaagggcgttggggcccaacccaggagcctggtgcagccccacccacgggccgcccagccctggaagggcagagaactggctgcctctggggtcacttgggacaggtgagcagcccagcccagcccagcgggtgggggaggggaggctgtcacctgggccctgcctccaccctctttctggttctcactccctccatttctctttcttttgcctttctctatttctgtcccgatctctggcgctctccccaacccagtaccaccatctccgcccctccgtccctcccctgcttccgccccctctctgggggcccccttcaccccggggcacattccagcttcctcccccgccttgcagtccctccctggagccagctgcctcctcggttgccagagcagagagagtgggcttgggccgaggtcggaggtcgaggagcgggcgggagcctgggagggcacccccaacccctctggaatgtgggtggagcggggcaagggagacagctggtttccacggagggcacatgccccatacccaggacgctacccacactcagccctgggggagagcaagcaaaaccaatgggtgccatcccacgaggggcctgcacagccatcccacacccccgaccagcacgcccgggacagccctccacaggccacgcatttatgggtgcggctggtgtgccaggctcccagatacacaacccccccccccagacacaccccatatacctgtccccaacctcaatccactgtgtgaccctaaaacaaacagaacctccttgctcagcctgggccaaggcctccccaaacaaaactccagcctgcagagtcccaccacacaccgcagctgtcaccagatacaaagagggccctgaccagatacagagagggcagcagccttcccccacaaccaacacacgcctgggcgggggcaggaacacccccagggcctccagccacagacactcacccactcacccctctgtgcaccagtgatcctccgctgcccagccaagcttgactccagcctgctggagtctgggtgggggatggagaggggttcccaggcgagccccaacctatgccttccaaaagtctttctgtgcatgttggaaatacaaatgaaacaggagagttagcatacgggacaattattatttttgtttgtttttgttttgagacggagtctcgctctgtcgccctggctggagtgcattggcgcgatctcggctcaccgcaacctctgcctcccgggttcaagtgattctcctgcctcagcctctggagtagctgggattacaggcgcccgccaccacgcccggctaatttttgtatttttttagtagagacgggctttccccatgttggccaggcaggtctcgaactcctgatctcaagtgatctgcctgtctcggcctcctaaagtgctgggattacaggcgtgagctacagcatccagcccaattttatttatttttagtagagaagggatttcaccatgttggtcaggctggtctcaaactcctgccctcaaatgatccacccgcattggcctcccaaattgctgggattacaggtgtgagccaccacacctggccccagttattagtattttcgagacggggtctcactctctttccaggctggaacgcagtggctccatcacagctcactgcagcctcgctggaactcctgggctcaagcgatcctcctgcctcagcctcctgagtagctgggactacaggtgagcaccaccatgcccagctaattttgctttttttttttttttgtagagacagggtctagctatgttgccccggctggtatcaaactcctggactcaaacgaaagtgctgggattccaggcatgagccagcgctcccggcctgcatacgggatgattccatgtggactgccacatcaaggaagcaaacaacaaggaaagcctggcgctgcgtggagctgtcttttgctgctaactgcccttgaccgacttcctaccaggtcttccctgtgcgcctctaaccccaggaggtgctgctggcatgcccacctctcagatgaagcagtgcggtccagagagcgtcttgggcaccgcctgcctcacagctgggcccctgaccctccagggactgtggctgagcagccatggctgcctggacgggtgtcccctggcccgtctgtccgtctggatgtgggaaccctccaggcacgctggggcgggcaggtgccaggtgcctctccagcaagatgcaacataggtgtcttcacttgcactccgtaggtcctgagcccctgcagctgcctgggagagtggggaaatactctccacttgtcccactccactgttgccatggagatacctcccaccctaggcagggccaccctgagcctggttggctttgcaggaaatccccactctttgacctctctgttaggcacaggacgtgtagtcccatgagagggaactgggcccaggtggagatccatccgcctaccccagagcgcgcatctgttgctaagcaacatctgaggctgcatggaggtgggggctccggagcccccagaccttttcccagtttcagaaactaggtggctgcatccccagcgtccacgcaggcgagcctaagcctcggtcagctttagggtgtccgtgggccatgcagggtcttgggcctttcacagacacctgatctgcacgtcacagacacgcatgggtgcacgtcactacacgtccgccacatgtgcttggctggtctgcgccccagcagaaggggtcacctatgtctctgcagtatcctgtgtactgaaagagcaaacaggtgtgtgaccccagggcaggtcggggtccgtcctgtccccagcctgtctactgcgtgtgcctgtggcaggcagggtctccggatgccgagtgcatggtgtatgactttgtgtccagtgggtacgaagcaggggtgtgggtgtgcacctgtgtgtggcctgtggcggggtgtgtgtgccggggatgtccctctgtggcccaggcctggcctttgggctgctgggatggcctggccggggcaggagtagacagggcctcccagcctccacattcctgagctgtgactcaggcctgtggggagggggtgagtcacagggaagggaagccgacccaccctgcgaacgcatccgaggaacaggagggaaactgaggctggggagcagctcagtccggctttcctgtgtagcagcccctgaatctcaggcccgggggtggggcggggtggcgggggggggcgcgcggggcctcccaggggacctgagatcccagccctggactcagctgggagctgggggaagaggcaggtttaacccttcctcttctgggcttctggaactctgggctgccctgggaggcgcggctcccgctgacacagcacgcgtgcccaccccagggacatgagtcacagcaccaggcatggacacatatgctctgtgggtcccggcacacccgagtcacgcacacccagccctgtccccggctgcccccacatccacatccggataagcgcacactttggagtccaagcgcccacctccttgggttgcacacacagcgccacgcagacgggttcctgtgtctttgcacacacgcgggtgccgggggctctgtgcacacacctccaagactgcgtgcacgcccctatatgccctgcgcaccgacgcaggccggcctggggtccctgcactcaccacgccgtgtgcactcgcacatagctacacattcgtgtccacacaagcttgtgtctctgtactctgcccacgggcacacatgtgcgccacacctggcaacccgcacgcccggtctctgcatcccccaccctggctctgggccccgcgtagtggggccagctgggtcggctgcagcctctgccaggacggtcctatttctgcgcccccgcggggcggccgccaggtgcacggtcccggcccccgcctggctaggaggaggcggtaattatgcggccccggggtcccccccacgcgcctttcatcctcggccacgcccgtcgcaggcctagacgctctctaccgcctcccgcccggtcattagtcggggtcgggggaggacctggcgtccggcgggcggggccccgtggggagggcggagtgggcggtgcgggagcgagggagctccgccctcgtctccatggcgacgccccgcaggggaggaggcccgggaggagtatcagggtgcaggaggtgcgcgccccttccgagacggcaggctggaaagggggcggatttgtgaatgggcccacggggcccaagacagacgcgcggggagcaggttcggggactctgactgatccccgcgcctcgccgggcaggggcgagccccgcgcgtcgggcccggaatagcagtctcgcccccgcccggcgcggctattttgagctcctccgttggggccgaggcgcgggggcggcgggaggctgggggtcgacacgcaggctgcgtcctcgccccgcgagattggacccctcgaggactgtgcgctgtggccgcgcagggctgggcggcggggccccctctcccacgcgaggcgtctgcgtggagcggcggcaccgggagcccggccgctcgagccaaacgccgcggacggagcgaggccgcagcgccccctggtgtccgcaacgggcagcgcgtcccggtcgggtcccgcatggtcagtggccagcaggggtggatgaaggggtcccagccgcctgagacccccggtggggacacaggatcgcggtgagatacctgggagtcacgggtgctcgcagacgcagctgaccccagaggcacaggtaccgacacaggtccacacctggaagccggtgcacagtgctcggcacagatgcaaagcggcaggtgtgcgcaggtgcgtgtcaacgccaccctgggaacccaggatggctgcggacactcacggagcccgcacccaggaacccgctcgtagtaagcgcttaataactaggcactggctgaatgaatgaatgaatgaatgaacacggcgcttcgcaaaaccaggaaaaggcagaggctcacagaaccagggaacgatgggctggggggagcggcaagaattacgcaattatgcaggggccgctgtgactaccaggcaccccctccaactccccccctacaagggctgctctgggtcagagaacgtccaccgcgctgactgctggggctgggggctgggggcgcagatcagaaagaatgggcctgaattgctcccaggctgggcatgtggcgcccgcgtctggggctccagtgggtgggtggcccctcccgcatggacggcgggcgcaggggagctcggtgctgatgtctctctcctttaataaccaccctgcgtgagtggctgacgcagcagccggctgccgctgacggggagtggggcggctgtagtgggggggcccgaggtgcagagggggtggtgatgaatcacacagctgctgcctgggggagggggtcttgagcccatgaggggtcccagagaccttgtcactggagacagcgcccctggctacccccacctcgatccacttgagggtggaagtgagtctgaggtcaggagtggggccgggatttccctgggatgagcagcaaagcgggggtctctgtacgccaacttcccccagcttgtcagcagagggtcatccctccgaagactttctggggcagagaggcaggggtccgcgctggcttcttccaccagggctgggggaggcggcggcatgagatgactcctgggcgaggagcaagtggtggccatagagggccccccagaggctttggggccgccgaagagtagtgagtgagggtccttgtaaagctggttctccagatggcggcggctttaagactcccctccgccaaccaggctcagtaggggaggcctgtggaaggagagaaaaggcctgggtggaggagcagagtgggcctggccccgcgtggggagcgagtgcgccgttgctgtgcagcacggtgggaggggaggccgagggccgggcggagtgctggggtgcagtggggactcggggtgtccgcctgcacccgacagcagggacgcacaacactatccggccaggcgagtgtgggggtgtgggccacgcacccagccgtgataatcgcggttccagtgggagttaggcttgggtgcgggttggagtttgtaggcaaactgggttgcgtaaagttggggtgcaccaaagtgtggcgatgtaggaagaattgggattgcgaatattggggttcgcatgaatggggttgtctctgttggggttttggtgggcatggggttgatggcaggaatggagtgctggggtgctgggaaaactgggacgtcggttgtattggcaagaatatcacgacaggtgtcggggttcagatgaagttgggatgtctgacagccgggtcttggttgggtaggggatctgggctaggttgttatgtcgggactgctggagcacaggcaaagtcggggtcccagtgacacccagaagtccccatgaggcctgaggcctgggaatcggggctagaggcccatttgttccccgccgcaggccagggagcaggcacgcgtaactgggtcagccccgccccgccccgccgcgcgctggtcacgccccctcgagcgcgggtggaggactgcggactgcaaacgtctcggccaatagtcgagcccgacaccagtccgcgggagggggcggaaccgagatagactcggcccccagctcatgaatataagacgcaggcgcgccctctgattggcccaggatgtgtagggggcggggcccggcggaagcgtatataaggccgggctcggggacgcccccccctcactcgcgcgttaggaggctcgggtcgttgtggtgcgctgtcttcccgcttgcgtcagggacctgcccgactcagtggtgagggccctggctgcaccggctccgaggagctcggggcggcgggcggcctgcggcggccaggcgaggcggggccgcagcggcacgcccctgggagggggcgggcccggggtggagtccgccccgccggcggcgagggacagcgggagattgggccgagtagcggccagagggcctctccccgccggtccgggccgccggcgacccggttgccgccgcaaaatggcggccgcgagctcgaggctgtgcccagcgaaatggcgggagcgccgagttcccggatggagtggcgcagggtgcgcgcggggcgcatgcgcacgcggcgggggcggggccacgtggcgcccccggtctccagggccgctttcccggccttggggctggaggtatccacacaccaacgcttttgcttaccgagccttagtttcctccttttcccattgcgattgcatgagggaaaggacggcctcgtaaatcttgggtaggcgtggcccgttctagtgtggttcctcgtctgccacgtcgtgctttgcgcccaaagtttggtccaagttggcacagctcccagtgccagacttccaagtctagttctcagagccactgggtggcggccattcccagccagtgaatgctttgtctgtgtcagcactgaccgcccccttaaatagccagttctcctaaatgccacttcccctgcctggaaatcctgccttatcacttccggggccatcccttcccgattcccggcctaggtcctggctatggaagtcagtacctgccctgaggtgccccccaggacggggcggcctccctgacagccagccccccccccagtctcaggaggcattttacagtgagcagaagcacgttctggtccagcaacaagtagatgtcagttggttagggtaggagttggcacccgttcggaaataggagaacctgagagtgcagtcctgcccagggcacaactggaaggctgtgggggaagggagacacccattgtggaaatgggtgcggcctgccttcagtcttgggggtggatggagtaaattatttgaattaagaagtcctaggtggctgggtgcggtggctcacacctgtaatcccaaaactttgggtggccaaggtgggaggattgcttgagcccaggagtttcagaccagcctgggcaacagagcaagaccccatctctactaaaacaaatttaaaaaaattatccaggcgtggtggtgtacacctacagtcccagtttcttgggaggctgaggtaggaggattgcttgagcccaggaggtggaggctgcagtgacccctgcactccagtctgggtgacagttagacacactgcccccgaccccaaaaaaataagtcctaggtatgagtttgagataatgaaaaataaaaatctgattttctaatatttcccctaaaaaacacatgtcatttacataaaataggaagcggggagaggtggtgagagatgacccctgttgaggatttcattggtgtctgccacaggccgccatggcatcagatgaaggcaaactttttgttggagggctgagttttgacaccaatgagcagtcgctggagcaggtcttctcaaagtacggacagatctctgaaggtgaggctgctgctgggcccgcggccctgggcgggggggcttgtgctcctcctacctggaagtacagctgggtgctgactgcagacctctctcccctgcacagtggtggttgtgaaagacagggagacccagagatctcggggatttgggtttgtcacctttgagaacattgacgacgctaaggatgccatgatggccatgaatgggaaggtgaggatcagggtgctgagcaggagtcccgtctcgaggatggggcacccacctgctaacccgtcccgccctctgtctccagtctgtagatggacggcagatccgagtagaccaggcaggcaagtcgtcagacaaccgatcccgtgggtaccgtggtggctctgccgggggccggggcttcttccgtgggggccgaggacggggccgtgggttctctagaggtgagtgccatgagtgggtcccttggggatgctgtgaggtactgctggtgggagctggtactcactttttcctgtatgtgcaggaggaggggaccgaggctatggggggaaccggttcgagtccaggagtgggggctacggaggctccagagactactatagcaggtgagggggaggccggcccaagcacaggggtggttgcgggatggccagcttccgtcccgggtcccaggtccctgggggagctgagatgagactggctgggcaaggagcagaggcaggtggggacccaggccaagaggagaggagactgctcaggacattcgcagaagcgggagggcctgggggacaggctggtggagattttgaacaatttccaagatgctgccctgctggggtccttgttgtgtccccagaagggacggctggcatgggggctggcggctcagcctgttgtggcagagcagaagtagacgggtaccttccggtactcaacgtttgtctgtcttgcagccggagtcagagtggtggctacagtgaccggagctcgggcgggtcctacagagacagttatgacagttacggtaagtcacactccgagggcgccacgctgctgtggcctgcggtgggagctcggttcaccttggtgccctctccaagcactttaggctggacactcagaccttgtcactgtgcttgcccagaagaggcgcatctgtcctctcagagccatttctatcgcaggacgcaaaagccaaatgagactgaccaaaaaggcaagggagagcgagggcccgctgggcagtcagctaggtgcatgtgtggccgcaggccagcctccctcggctgtggggggtggttgctccccggccgcaggccgcgccctggtctggcctctggggtgaagctgcctcttgttgcttcggtgcctttacactgtgcctgcttcttgtcctcagctacacacaacgagtaaaaacccttcctgctcaagatcgtccttccaatggctgtgtgtttaaagattgtgggagcttcgctgaacgttaatgtgtagtaaatgcacctccttgtattcccactttcgtagtcatttcggttctgatcttgtcaaacccagcctgaccgcttctgacgccgggatggcctcgttactagacttttctttttaaggaagtgctgtttttttttgagggttttcaaaacattttgaaaagcatttacttttttgaccacgagccatgagttttcaaaaaaatcgggggttgtgtgggtttttggtttttgttttagtttttggttgcgttgcctttttttttttagtggggttggccccatgaagtgggtgccccactcacttctctgagatcgaacggactgtgaatccgctctttgtcggaagctgagcaagctgtggcttttttccaactccgtgtgacgtttctgagtgtagtgtggtaggaccccggcgggtgtggcagcaactgccctggagccccagcccctgcgtccatctgtgctgtgcgccccacagtagacgtgcagacgtccctgagaggttcttgaagatgtttatttatattgtccttttttactggaagacgtacgcatactccatcgatgttgtatttgcagtggctgaggaattcttgtacgcagttttctttggctttacgaagccgattaaaagaccgtgtgaaatgaaccttgctctgacaattcccttgcattgcaccacacactccttgctgcgggctcctgcagccagacctgagcagagagagaaggtggagaagcagcgggtctgcaagccttccctggggcctgcagagctagaaagggaggcccagcagactggcgctggtcagggtaggggagccaggcgggggacgggagcgggcagctcaggcctcagggcagccctgggaggcttctggcagtggtggccagagggctggactgtgcgggcagcttagcagggacagtggacgtgcacctgacgctgacctggactgcctcagtctagaagcaggccagagagcagaggcacgtggcatcccagggcgacctcagacggccagccggttagctagttctgctgttgcttcacgagttctgagcattctctgctagcctatggaagctgcagccctcggaggacagaagtgttgtgcgcccaacagaaccctctgagacgcaagctgctcccttggctagctcatatgtggaaatagccctgtaattcgaggtaactccttccgctcgtgtccacatccctcttgttgagagctcactgaaagtcatgtgcccggggaatgttcctgtgactgttttttgtttttccttttttttttaactttgtttttgtttttttcaattaagctggaactaaagtcaggcccagccattacgctccccacgtgcagccaggtgcagcctgggcccagtcatgcctggctcatagatgaaatcccttaagcaggattgaagaccagtgaacgcccccgccttttggattttttgctcaattgaccgtcttttccagacctctttaagtcacactcttaacttagctttctctgatgtctgttgccgccattagtttttttctagagcccacactggcccacatagctccatcccatacgggtagctggctccagctgcgccaaggtgcagacccgccctgggcatgctggcctgtgacggagcctgaggtcacagccccctgactagcctgagaccttcctaggggctgtggctgtttccggggaggccgggaggggcagctgtgagccctgtggaggacgttgggagtaacgctgctttgctttggcaggttgaaggggcccggccaggactcggggaagggtggcctgagagcagcgatgacctctggggtcactgtcccaggagggacttcacctggaacaagagctggaggcagccgcttgcccaggaggcttgtcccctgtaagtgctttcgggaagagtggcatgtggcgctgagccctgtcccgggcggcacctgggcgtttcagtgagtcctgctctcccgcacctatggccccatggcgggcgcctttcggtgtgtgttgggtgcagggcagcgcctcccgggagcgccgggtcccccgcctggagcccgcgcctgttctccctcccttcctcctccttccaggaggcgcttcgccagtgaggtgcgggctcagggcctcgagtctctcctggagcacgggctgcggtgcgccggcagcttacggggcggccagtccttgcccacaacgatgtggagccctgtgaaagtcggattcgaataaagggccacgtgtgcacccagaaagccgagtctgtggttcaggggggtctgtcggcggagcggggccactggaagaaaagcctgcggacctcggttcagcgcacgagtaggacccgacagggaagactgcaagggtcattgtccgagcagtgaccgcggggggctcgccactgagggggttcgcagcgcggagactccagtctcgcgggatctgaggcgcactcggcttcgagggagcggcggccgcgcagccgctgtcaggccccgtcttgggccgagtcccgggttccctgtagcaggcttgggagcggggcgccaccttcctgggccctggacgtggccgacgcgttctcagtgtccgtgaggccggggcaggagtggcgggggtcgccccgaagtgggtgggaatgagcggcccgaggtcctgaagtcggggtccgccccgtctccccgctgccagcccgatttcctcggaagccgcgaccccccacgctgggctggcagttctgggctctgccggctgcgccttgccgggactcccacgggcgggctccgggcctccgtcctgatcccttggagcggttcgacgaagcaagttccgcggcgggcgcgcggggcactgtgggtagcgccggggctcaccaggcggaggcggggcccggcgtcaagctccgcctccgcgccccattggctggcatcacctccgcgcgcctgactgacagcgcgcataggggcggggcgccgccaccgcttccgccgggccatggggccgcgcgtgctgcagccgccgctgctgctgctcctgctggcgctgctgctggcggcgctgccgtgcggtgccgaagaggcctcgccgctgcgccccgcgcaggtcacgttgtcgccgccgccggccgtgacgaacgggagccagccgggcgcgccacacaacagcacgcacacgcgtccgccgggggcgtcgggctcggcgctgacgcgctccttctacgtgatcctgggcttctgcggcctgaccgcgctctacttcctgatccgggcgtttaggtgcgtcaggcgcacgtgggcgccgtctctcagccttggccaattagcgcgcgcctagtgcgtcacgtgccgggccgcggggtcctcccctccctccctccctccctccctctctccctgttggagtgggcgtgggcggtgctgtgcggggtcgtcacgtggtgtgggcggtgcaggggccacgggactcacccgctctccagcctgcgcctggggttggaggtgcccagcgcgccgcctcttaactcgggggtgacgctgcccgtttcccaggtggggccactgaagccggagcatgccgggcaggggtcaggccctggcggggcgagggggcctccttggctccttgtcgccggatgcccgtcctcgttctcatcttcccgcctgccgccaggcctttccgtggggtcccgatattttcctttctgcttctacccactgaagctggttcgtcgccagggtcggccacgtgcccgccttgggtgctcccacagcccgggaggtgcagctgcgtccccagaccctcgcgggggtctccagctgtaggcagcccctgggcaggaggggcttctgcgtgttcaggccaccccggcttccctggcctgtggctccagtctcctctgggctcctgactacccagtgtggctgcttctcccgggtgggagagacacagcgaggaccttatccctccccatcaccaccctggcaaagtcaagccgctttttattttttataagtttttattgtagcgatggggtctcgccatgttacccgcgctggtctgaactcctgggctcaagtgatcctttttcgttggcctcccaaagtgctggcattatagatgtgagcacctgcactccgccatgctgctttttatgggccctgtgcagagcctcccctgtgctccacacctcttcctgtggaagcacctgctgcgcgctctcccctgcctgtatgccgcgccctccctgcctcccgggctgctggggccaccaggggcttggccctgagacaggcttccattctgttgtctttggcaaagtctcacccctgtgtgagcctcagtcttttcatcagtgcaatgggagtgacatcagcgtgcctctcctggggtcctggcgcaggggagatgggagggcctggtagggcacatgtcttcttactgtcatcgccatgggagtgaatggtaatcacttggcgattaggacatgaaagaagcaggcacagcaaaaccagggaggtctgcagcagggctcggggctccagtagaggacggcaatgagagtcctgagggaaggaggaggcagggttggcggggaggggccactgactatgcctggacctacttccaggttgaagaagcctcagcggaggcgatacggcctcctcgccaacactgaggaccccacggagatggcctcgctggacagcgacgaggagacggtgtttgagtcccggaatctgagatggtgtgcacccttccccagctctggggcctcggtgggcaggctgggctggagactcagcaggaccctggggacttggccaagccatggagtggtccctgcaatcacagctgacagcggtagtcaggccatggccccactgggcagggctcatcccttctcccagcctccatttacaactttttttttttaaacttaaatgtttgtcatttatttatttttgaggtggagtggcgcgatcccaactcactgcaacctccgcctccgggattgaggcgattttcctgccacagcctcccgagtagctgggattacaggcacccgccaccacgcctcgctaattttttgtatttagtagatagagatggggtttcaccatgttggccaggctgggttccagctccttacctcaggtgatccatctgcctgggcttcccaaagagctgggattacaggtgtgagccaccgcacctgacctaagttttgttttgttttgagatggagtttcgctcttgttgcccaggctggagtgcaatggcacgatctctgctcactgcaacctccacctcccaggttcaagcatttctcccatcgcagcctcctgagtagctgggattaaaggtgctcaccactacacccggctaatttttgtagttttagtagagacagggtttcaccatgttggccaggctggcctcgaactcctgacctcaggtgatctgcccgcttcggcctcccaaagtgctgggattacaggtgtgagccaccgtggtcagccttcttgcttttttaaggcaggaaagcggctgcagggcttagggtagtggttgctccatctgggcccctccctgagggatgaggtctaagtcaggtggagaactgactgcaggatgcttctgagcgggcggggtcagggagggcctctccctggtgtaatggggctggcttctggaagagtgtctcaggccgagggaacagcagggagcggccgggctgcgcagatgccgggcgggactggggtaggcctgggcatcgaggcagctgtcaggggttagcagggttctgggcagggaatgatgggtatgttgcgctgcagtgtggctgctggggggaccttggcctgttggggggtggcaggcatggaggctgggagaccaggagactgggcggcctctggggacagctctgactttttgagcccccagggagggaggcactgggatccctccgcatgctctgactccattctgggaacccctcccaggtttcttctacctcctggctgggggccccttcccccggagtgggcagttgcacagggcccaggaggccggggagggaggccagtggggggaggctgggccctggtagaccgaggggcctggacaggctgcctgcccctgcctgacctgggtgagcctctgcccggcagggcgggcccttcactccttccctctcacccttgaccccctgctttcagatgctgagccagggaggcggcccttccagcagccatgagggaaggacaggagatggggcccaccccagtgcccagcaaccccctgctccaccgctcattcccctgctggccccggggctggtctcacccagtgccaacccgagagctccttttggaacctgcacagcccgccgacctgttgccacctgcacccaccgctggaccatgcagcctcgcctcctggatgctgtcccagcctggccgagggtcccaggtgaagactggagggaccccaacagccaccgcccaggacgctgaggctcccttgcctgactgtgacttgtgcctctctcctgcccccgtggggacatggcagcccagagccaaggctgggtgggcaggtgacccaaggaacctttctgggaacaccttctcgccgggctgggaacaataaatgcagccatgtctctgcagctggtgctgaccccatgccacctctagacccgtgcgtactggtgcagccagtgtgggggtgggtggcggagcagggctcaagccagcctcggttccccatctgcgaccatgcttgggttctccagccttgctcccaagtaaggaacccatcttcagctgcctgggatgaggccctgcctgtcagcatctctcttcctagagagaactcctattcatccgtcaaagcccctgccccagggccccctctatgccatcccttcagcctgggtctcatgggccctgccctggaggatccccacatcaccctcatgaatacctctggcaatgattccagggagccccagagctctgctgcaggaggctggagttccgtgcggcctgggtccccatgccggacactcctcccccatctgcctcctgtgggacttggagcctgagaccccatcccaggcaaggtgcttaatcagcttccctggggccttgttcttcctgcaggggcctgtgtctgggcggagtccagccctggcctgtcatcctgtcccccatgaggttagccttggagagaccatggtgcgtgggtacccatggcctgaggtcccccacaggcaacctgtctggagctgccactgccctgtcacgaggaggagctgccaccaggtggcagccttgagccgcccagtcctctggctgtctccttggtcctaacccttcatgtgggaaagcaagtccagcacagcccatttgtcactccacttcctgaacccaccgtgtcctcacatccactgggggatgggcagtcccccaggtttgcatctcacatacctgccgaccctccctgtctgccgccagggttgggaggggctgtctccactgggggccaggctatcgccccttcagaccagggtcccctgtcctggtactatctgttcccttgggcatgtccgtctgaccaggcctgccaagactctgcttacgtttctccttccccttccagtgccctgggtccttctctgccccagcctcagctgccgcctccaggaagtcctccctgattgcccaccccagcctgttctttaggggaatcctgcagggaaggttggggaagcaacccttaaagtgagggcagagcccgagggaggcccctgagactgcaggtggggagggcagcttggctcagcctggctgtgtgtgggactggggacaagcaagtcacacctatgactcgggctctgctgttccccatctgtctggccgttgcgtctgtctccaaactcccgtttgcatctctccatctgcctccttcactttgtctctgtccgtctctgtctccatgtctgaccctttgggacacacttttaacaggcacggagacaccagccccggcccccaaccctgtgatctgtgccccccgtcccacagctctgagcgctttcaccagcttcaaaaggcacattaattactctaatgaggtcaggagagacccacgctctgccatccggagtcggaacatgccgcagcccccagcccagccgccgccgccccccgctcgagcagggagaggggctctgctgcctccgtcccctctgcctgtcggggcccgtgctgcaccccacgttgctgcagagtaattggcagccccccaaggttaatgcactgttagccaggggttctcctgggctcagagccggagaggggcctgtcagcgagaaatgaaaggccccaggtcccggctggtgctcggcttgtgagcgtgtgtgtgcccgtgggagtgcgtgtgtgtgcgggtgcctgggagcttgcgggggcgggcagtggcttcctccacctctcccacgcagacacgcagacacgcaggcacccacaaaatacagtctcatagacacacggtaagcaactcggacagttccatggatgggacgcccgcagccccgtgggacacgcgatcacacacatgggtgtgacctgctcagctcctaaccccacgccggggagtgtctcagacccatgccccccacccttgcccctcggtgtgcccactggacaagcagcatatcaggtctgtgcctctgggtgggggggggtgggggtctctgcttcagcagcgggccccgcccaggctggagtccagtggactcactgcggggcttctccgcttgtgaaataggggcgggtgggcgctggggacgtggcctcaaaggcgggatgcgttgggttccttgcggcgccggcttgtgcccacagcttggggccgacattcatcctggggagatagagacagggctcctctgccgccctggtgccggggtgccccagggatgtggccccatgtgccaaatcacagtcactcgggttggcaggcgacggagggctctctgcctcttctgggggtgctgagacccctgtaccctcgactccccacctccagggatctcacccccaggtgcccatctcctctgtggggggcctgagccaccactgaccccacattaaggccactgacgtccccgtcctaggccagccagcccctgagaagcacccagtgctttgctgtgggacacaaagccacacatggctattcacgttatttcattaagttacataaaactggaggtccagggcctcagtcaccatggggagaggtcctcagtcgccatggggagaggtccgggtcctcagtcgccgtggggagaggtctggggcctcagtcactgtggtggacagcgattggtgggggcagggacatttcctttgtcttggaaagttctggacgctggtggtgtctggacactggagaacgggtctgtgttcaggccccagacctgaaggtgggatgagggagagaggaaggaggaggaaggggaggagggaggggacagagtgggaaggagaaggatgtgaatggagaggaaggatgggaggaggaaggaaggaaggagggaaggggaggaggaggaaggagaggagggtgcagaggatgggggaaggaggggggaggagggtgtgaaggggaaggagggaggagggagcggaggactgagaaggggaggaaggtgtaaaaggagagggagagaggaaggaagggagggggtattaagggggaagagagtgggaagggggaggagggaggggagggtagtatgaagggggaaggaaggagggaggggagaagggtgggaaggggaggaaggagagagggagggaggggaaggtgtgaagggaaggagggaggggaggtgggagggaagtagggagggggagggaggggaaaggtgtgaagggaaggagggaggggaggagggagggaggagggtgtgaagggaggagggggaggagggtgggaggggaggagggagggaggagggtgtgaaggtgtgaagggaggagggagggaggggaggagggagggaggagggtgtgaagggaggagggagggaggagggtgtgaagggaggagggagggaggggaggagggagggaggagagtgtgaagagaggagaatgggaaggatgggagctggggaggagggaggagggtgagctgggaatggggctgtgtgcctgctcttttccaccactggctgcaggggttgcaggaatcttgggtccatggctggatgggggtggggattttcatgttacccactggagaaagggatacatttttattttcaaggacagcgacccagcccaggggaaacgcccctggcccctggggctaagcgcagaccccagctccgtgcttcgcaggtggggggcgatggacagcggtggggctcccgccctgagtggagcctgtgacctgcccgggccccagcgccccgtgacccctgccgcctgatccttgcctggctgagatggggcttctgaaggctgccggcaccagggcaggcagcgcattgggtccaatttattctgtaatgagaaattctccccgcatatttttagcttcctcctggcgtcgcggcctttgaaggctgaggggctgcgggacgctgatcccaagccctgtggcctggccatgtgggcagtgggtgctgggcacgggctggacaagtcccttcctgagtctgggtagaccccagtcccagcagtgcagagcagggggcggggccagaccccatcaagccctgtactggctccagaccagggactgagggcgaccctggataacccctgaccttggcggacacctgttcccagagtgagcctgatttctgacccttggctccacaggaagcttactctagagtgacctccggccgcggctgcgtcccaaagccgggacagctcccagccccaggagggaacagggcttcttggacccccacagtggcccccctgccaggcaggggtttgccggggcagcctcgcccagggccaggcctcggagacgccctgccctcccctcccttccccaggtccttcctctaggagcggccagcgggcgcggggaggttgaatgggggacgcaccgcctttgttcccgtccctgcttgggctctgaccttgagagagacaagaacagaaggaaaacggagcttctgctcaaatccgttcagcggtggcggtggtggcggctctcgcctcggtggcccctgcatgcaaatgagtggccctgccatgcctgggtggaggtggtgcccttccagctcccacctgtgcaggtcccagtcctggtttgagaagagaccccctcctcccgaccctggcccacccctcctcacccacgagatcccttgaagcaggagggggcttctggtcccagggtagaaggaagcttccagaactcccacctttgccaggtggcatgctggggccgggcacgccaagaccccaggctcacggccccttgtcctgtgcttgggtgcagccgccacactctgctccgaaagtgctcacctccgggagtggccgtccccctccctaaaagagccccccaccagacggagccgcccgggaagcttctccagcctgtctgggctacagagccttgtgtggctagaacccaaggccctcactccaggggtgctgagagagcctgtccagagggcctgcctcagccaccacctgggacaggttcacgccctccactgaagagacacccggccagccctgggccttcgacctgggacgtctgtagtggggtcaggggatgagacctggagctcagaacagacgggctgagctccctggaggagagagaactgagaaccttgtcctggcagggacgctagagcactgggtgggacagacctttctggaagagcaagattttaacaggaagaaaaagtggaaggacttcccagcaggacccagcctgaacaaaggtcaggtggtgtggcccgcgtggcccgctggggaatcgggggaggagggcacgcaggagacacaggacagagcccaccacgtctcagagctgtgggacggtggtgggtccggtccccaccccaccttgctggggcacaggttagcttgcccatctctgggttcacggtccctgccaggagtttgggtaatgcctcacacagggaccttcgggtccaagggctgttggtgcttgccctgcagttccctctcctgcactgggcctggtgaatgacactaattcagagacgtacaacacgatctgggcatcgccagcaaagtccagccagcgtttgatgacagcctaccctccacaagctcagagtctggtgagggaggctgtggcatgaataagggcaaaaacagagggcaggccaggtgcagtggctcacgcctgtaatcctagcactttgggaagcccaggtgggaagatcgcctgagcccaggagttcaagaccagcgtggccaacatggccagacactgtctctatagattggaaaaaagacaaagcagaggccaggcccccagttccccacctgtgtcagcctaccaggaggagaaatcactcggcgttccctgaacagatcagaccccgggtctttgcacaagctgtgcccccgggcagcggccctcccctgcctgcaggattcgtgcgtggagactgatttgctgtcggccggggcttcactctgggcttcttggatcccatccccagctgctcacactccacatcggtccacctactatgctcccggcacccttagggctgaggtgtagggacttactccatccccagggaacagcgtgggtccggagaggcgactcccaggagggccccagggaggtcgcagcccgagcagctttggactttggccagcgcccctctgaaactctgccccggcccccgcagggagactggagttggccgagcccgatttgggacgcgtgcgtcggggttggtgaggctgcggatagcgctggaaccgggcaggtgagaggcccgggacccagggccgggccgggtggagcgcgtgggggcgcgggaggcagggtgcgcccccgcccctcggagaccccaggccgggccacgcggatgccggcggggggcgcgcagaatcggggtcgctgggggcaggccccgggggacgagcctgagacggggtgggccggggcagggggcgggcgcaggctggagacccccgcccagtccccgcgcggccggggcacggcgggagggggcgcccgcggccctcccgacgctcgggcgggacaaaggccggagcccgggcccctccccggcgggtgcggcggcggcggcccgcgctccgacagtccgcgcggccgggtcctgcgcccggggcgaccccggcgccccgccccgccgccgcctgacttctcggcgcccgaggtcgcgcgcgcggaggcgggggcggcccgggatctccaagcgccgccgcgccctcctcccgcccgccctccgcccgcccgctcggcggcggcggcggcggcggaggaggcggagaaggctggcaggcggcggccgggagagcgagcgcggcggccggaccggggccatggcgcccgcgcagcgcccgctgctcccgctgctgctcctgctgttaccgctgccgccgccgcccttcgcgcgcgccgaggacgccgcccgcgccaactcggaccgctacgccgtctactggaaccgcagcaaccccaggtgagcgcggccgcgcgcggggggcgcccggggaccccccaacgccccccaagccgcgcccggcctcgcgcccccggagctccgggcgccccccacgcgcgcgccgccgccgggatgcgggcgcccggttcccgcgggagccccccagggagctccggccccccggagtttgggggactcgcccttttcgcgcctgccttccccggggcgccccattgccctacggactgtggggactcgcgccccacatcccccagagcgccgacgtctcctggagtttggggaacccctctggtaccctccgatgccgggtagcccctgagttgcctgcctggacttggggggacccctgatccacccgcttctctggggagccccctcggtttcgcatttggtggggatccccggggaccttggcaccggaggtgggggactgtggccctcgagggatctctgggttcgtcctgcccgcaggtccccagatgaacttggggaagttggagtgtccctccctcaggacccagcatctgcttcactccagggggccaagggcccagctttgaaaggagactgaggggccggggagctgggggtcagccccgggaggggcagtgggatggagtcctctcttgtcctctgggcgctgaccaggaaactgaggtgcagaggggatgaggagctggctcaaggtcatgcaagggggggacttgggggcaggacccaggtggcccagtgccctgcctgccacgcccggccgagatgccgcacccgcctgctgcaggcccccttgttttgaaccaggtccgggccaggcacaacgtgggggacaggagaagcccccgttggtcagagcaaaaaaagtttgccggggcctggccatggcctggacgtgggtagaaccctctgaaccatcccagggtctccaagacaggagcaggctgcagcttccctgggggtcccgtgggagccggggctttgggggtcctggggctcgggagggagtcagccccagcactcagggtgtcaccgtcttcctaaggcacacggagctgcacatcgggggctgaggcggcccccccccactcttctgctactggtcactttctctccgttttccagccgcttcctgtgccgaccgagccgccctctggagcccgccacccctccttgtcccctctgtctcctgctgtcctcggtccccgggaggaaagttgcatgaaggggtctctttgaggcgggctcggggacaagggcggcccgtgttccgccgtgggggtggggaacacgcacaggcccaccccccaccctggtcaacggcctcgggtcgggccctgggggctgagggcagggaccccgggccgctgggggacggctggcccacctcagagcgggtccccgagccgcccgctgtgctggtcacatgtgggtttgattaaggctgtcgctggccgtgcggggagtccagcgggcagcgcttccccggcccaagtttttggtttcagctgcggaatctcccgtccccagcgtggcctgtcctttgttctagcaaacgccaaacacacgaggacccggcaaccgggggaggaaggtggtcaccagggccgtcctgctgccccacctgccacagggctgtgggctgcgggccggacccccggccaggggaaggaagtggcctccccagtgcctggcttggcccagccacctcctgttgctccgggtctgacctggttgcccagctcaaaccgctgcctgagggaacggccttgctggtccgcagagccgacctgggcagcaccgaggctgcctcctccttcctctcctgcctgcggtatccagggttgctggggacggagccgacaccctgcagtggggcccagggctgggtgagcaccttcccgggaagccgggatccagccagaatcagggctttgtcgcggacatcaggggtctctgcagttctcagatttggtgtccaggggcacctgcccgggacctgtgcctgagtggcgggggtgtcaggcacagcagggggtggtgctgggcctccgtatccaaggggaccctgtggaggggacatcggcttggggagaggagtggcgtcagccggcaggcctaaggtgtgaggctgggctggccggggagggatgatggggtcgggcaggtgtgtgggggatgcggggaccccaagtctttgagaggggcatacagaaaggcactggagacggggacagccgcgatggggggcagacagcagcgtgggcaccaggggaccgtgtgctcgatggggcctgcaggcccgggcagtgccgcagcgtcgccggccgccccttccgcccattggcctggcacctgtgcccaggcgatgactgtgtggtctgtctccacatcacaccctctctgctgtgagaggcgatgcctgcacccaggggaccccgcacccacctccttgggccgctataaggtggggccccgttgggtggtctggctggccggccccgccactcccaccggtgactgcacagcgtccgtccaacccactccccaacctgggctgggtacccctgagctggccgccaggagtctctgggcctgttcccagccgacccgcatcgggctggggcgtccagggcttggacctggccggctgccctcacctgtcctgttggacctggccggctgccctcacctgtcctggccacaacaccgcgtgtgcattcccacggctgctcatgtgtgtttgcgtgcagcggtggggaagggtggcgtgcaggtgtgcctggagtcgcatccggctgcaggttacatgtgtctgtgtgtggcaggaggctgcgtgaatccacagggcacagctctggcgtgtttgcacatgtgtctgcgtgattgcatatgaggtgcatgtgtgtgcatgagtgtgtctgtgcgtggcacccgcgtttgcatgtgcgtgcccttgcacgggatgtctgcagtgtccgaggtccctgtgcgtgtctgcctgtggcatgcatgcgttttgtctgtgcgtggagtgcaggtgtgtgtgcgtgtctgcgtgtggggtgcatgtaagtgtgtctccctgggggcagtgctggctggctgagggcctgcaatgtgggggcagtggtggccccagcacggtccacaatggcaaccccgctgttggccctccctctcctcctcccctggggacgggaccagggcccgtgtgcagacggccatcaagcctcagagcagggtggacgcaggggcctgtggtccccgggagtccccaccttctgattggaaatctgcagccttgggggcactgggtgggcgcttgcccacactgggcatctctgggcttcggccaccctcccggggttccccacggacccagtggccctcgggtgtgggcagcagccgggttcccctcaaacactggatggaaaatggtgacctatgcaagggctcactccccgagggaggagccgtcccccagcagagggcagaggtgaacggggtgtctcgctccccgtggctccgctggcgtccctcggcctctcggggagccggctttgaagggggtgatgccgtgttctgctgcataagggttttttgttttgtttgagagaagctggtccactcggcattgggggcgctaggagagccgggcggtgggcctgggggattcggggcctgagggtggggtcctggaggccgtggggtacctggactcagactcgggagtctgggagacctgggcatgacgtcaggcaggtggcttagcagcctggaacccccaggcctgctctgcgaagtgggggtgacggagccctgcggtgggtgcggctcggccgatagggcctggtgtggatgggcaaaggcctgagggtggtcccaggggttagtgtcccctccccagaagggaaaccgaggcagctcctgtggtggggaggatgcttctgccgaggcaccatggtctctgtgtctcacggtctctttgggtctctgtcttccccatctctgggcatcctggggtgccatgggtggcccaggccttccgcctccactgcaggcctccctgggcggcctcagtttgcagagaagggaacagaggttccgtggcggggggccgtgaacgcagtgggatttgaccttcccccgtctctgggctgacgtctccgcaggtctgcaggggactggccctacgtgggtccctcggggtcacggcggaggcagtgggttgtgcattcatgggggtccgggtggtagcgtttctgtggagccggtggtctccttgtcatccatgagggtcctgccccggtggccgtgtgttccccgggacacggcttctctcctccccaggaaccgggatgcagccaggccttgcccctcagtcctgtgtgtgggaccagcctctcctgcagatgggtcctcagggagagctgggctttgtaccttgctgggggaagggctgagctgctcccgtccctgtgcccaccgtcccgtcgccccagacacgcggctggagcctgcggaggagcagacgagccggcggggtttttgctttaacctcaagcaggcgtttgaactctgtggccgagtcggtcctggtggggggctcgtgccacacctgctcccagaccaggctggtgtggggtctggccgagagactcagcggcgtgtccccccagctctgtgcgccccttgtccacctgccctgtgggtcaggggcccccaattcagggacagagcagccgaggccctgaaagacggtgactcacccaaggccacccggaagttgggcagagtccagggtgtcccacctggggccggcccgggggaagccagggacagccctgggaggggcaggaaggtgggtggccgacggcagctgcactctgtaccagggccacccacgcccacggtgacggaagcccaggtggggctgaccctgcccggcccatctttttcctattttgcttcatttctagggccctgcctcagtttaccctcctgcaccacaaggccatacttgtcctttcttgggcagaccttgcaccatcccggggactgatttcccttcaggtcccacccaggtcctgagcaggaggaaaagctccagtcctcagtcaggggggacatctcttccgtccctggaaaagccaggtgtgggtgctgtcaccccagcaggtcttgctgggggtggcaggaggggacgggcggcctcagccccacgctgggcttcaggacccgggctgcctgctcatccggccagcctgggcctccccgggagcttctccaccctggaagagagatgcagacgggtgcaggcgtccacctgcccacccacggggtcctggctgccggccacaccactgcctcagtttccagtcctggaaggcagcccagcccacccccaccccagttttgggtgagattcctaattagtcgcttagctattagcgtctaataacttgacaattgcccgattggagctaattagctccaggccgcttgctggaagctggtgacagccaggaggcccgggtgggcaggaggggagccctgctgggtgagcctctgcctggggcctggagggctgcctggaggcgtggactttggcacccgcaggttgagtgagtgtggggggaaggtgtggcccggcagagggaacccggaggagtaaaaactgccaccgctgctctgtctgggaaaaatcccaaatcagtcattaaccccttagtgagaatttcagtctctctgccgctccggggaggatttgcatatcgaggcttcatcactaatggaggaagcgaaggctttgtctgcctctccccaggtgcggttttggggtgggggccccctcccccctgcaggcgccaccctcaacaggggcaacgcgcccacctcgggcttgcccgccaacttggaaccgggaatgccaacacagcaaggccgctgctattttagagacgcaaagggaaaaatacggccccactccggcaggcagagccgggggtgggggttcccctgggacctgccctccaacacacacacctgtgggctgctccccacaactctggcattgcaaagtcctcgcctcttgacctttttaattcactcattattgagcaccactgtatgcagggcctgtgtagggccctggggaggggacagaggaggccaacatcaggatccgggattcagacagcaaaccctgtaaagagcagatgtgatatggggcggggcacagggaacagcactgcaggcagtgggaacagcagctgcagaggcccttggtgggaacagggacagccgggaggctggtgtggctggaagggaggagtcttggagagaggaggatgaggagggcgcagtggatgggccacacaggcctggaggggtgtggattttattctgaggatcaggaatggatggagggctctgagccgccgccaacgtgttacagggtctgttttgcagaagagcgaggcttgggatatggggaggctgggccccggcagaccctcaccgcagcctggaggggcccgggcacctggccgctcagccacacagaagcctcggtctctgacattttaccgaaggcagaacaggaggagagaacacagtggtgtcagacgtgggggaaggaggcaccattggggaaccaagaggccagagggggacctacagggctggtgctgtgggcactttcagaggctgctctgtctcaagaagtgtcctgctaggagccaggttctttttttgggttgaatgtggctccctggggatcactgccgggacaggaggggaaactgaggccagagggcagtggggagcccagacgcccctgtggtccctccacggaggcctcccctgcagggtgacctgggtgtgggcagtcccaggcgggagctgggccttggctaccatcgaccgcctgatcaatgggctttcacttgggctgggcaggaacgaaaatgacttttcaaaaaggctggagcagcttctgcatcgatcgtgcccaaggggccagcgggtcaatgagatgcctgtgcccggccggccaatggggcagcctgaggggtgggctgaggccgagcccatctccatctgagcctgtatgggggctgcccccgtgtctgtgcggacgcaccccgagtgtccaacagccgggaggaccatccccttgcacggaggggaaagggagcctctgagaggaggccggacctcgagacccaagggttcaaatccagacgcaagcccagaactgcaagattccgaagccccggaagggcccctgccctccaggcctggtgcccgggggagatttccctgcaacacgccctcccatgtcccctgtgctgggctcacaggggtgatgaaggaggcctgggaagctctctgtccctggacgaatccaaccaggtagggaagggctggagggtgacttcaccgcctccgccgccctgccttgaaattctttgctctggagatcttcatgccggatccctagtggggaaactgaggcgcaagtgagcacacctgtctgccccttctcacccctggagacccaggaacccccggccccgcctggcgtggcatctcagggtggcggggggccgggctgatgccatctgataatcccaccaccctctctctcgagctgctgtgccaattagtgcccccagtgtggggcctgcggcgggctcacccctgcaggccggggtggcggtggctgtgccgggctagaggcagtgccagggccgggatcgtagcagcctgcacccatgtgctgccaacactggtggggcctcagtttcccctgcctgtgcatggagggaggaggcaggagcggtgtgggggaccccccattcctccctgttcaggtcttttatgtgctaataagcccctctcagggcccccctcgtgccccgcttggtccaggccgccggttacatgacaggggccctggggaccacagccgggagatctaagggctcctgccgccatcgcccgaggcagtgagggaaggggagccgccggtcccttcctcggctgatctctatcctcacagacgaggctgggtcagggggctccctggaggaaggggcctgtgggttgcgtctgggggacctcagggcaaaggcctggaggcagggctgggggctgaggtgtcaggagtgcaggcacccaagagggagaccaggaggccgccggattccggggctcggggctcgggaggtttctgggttccagatgtgagagggtggtatggggctcgcagggtcacacaggaaggcaggggtggggctgggagtggagcccaggatgtctccgagctgggcggcaggtggaactcggcaggctgagagagagggggcggtgggcggaactctgggggtgctgagaggagggtggagggattcttcacgccaagctccgttctctttggggaaactgaggccagggtgggggcagagcttgccccagagcgagctggaatgcccgacctgtgtcccccacgctgccccggtccttctcaacaggtgggagtgcagaatgaaagcagggctgggggctgcctggaggaggcggcacagatgttaagcatgttaggtagatgcgaagtttctggagagggaattcttgtggagggacagctcgtgcagaggcccggagtcaggaaccccccgccggccctttgcacacaggggtccagatgtcacccacctggacacccacctcgctgctggccctgccgtggggctgttggggacactgaggcaggaggtggggggcagtgccaggcaagagatcgtgggctcccaaccttggaagcccgccgtgattggggtgtgcaaccccacctgctgaccgctatcaccattcagggcccaggcggagtccaccttgtgaactgacccctcccccattccccggcctgacttccccgtgcacctgtcccctgacccgtccctccccgctcaccctgtcccgtgccctgtgcacctgtccccggagccatctctccccgcgcacactgacccgtgccccatgcacctgtcccctgaccctgtcccccctggcgcaccctgacccgtcccccgtgctcctgaccccggccctcgccgcgcaccccgacccgtccctcgtgctcctgtcccctgaccctggccctccccgcgcaccccgacccgtgccccgttcctcgctccgggcgctgacctctggccgccttgtccccgcaggttccacgcaggcgcgggggacgacggcgggggctacacggtggaggtgagcatcaatgactacctggacatctactgcccgcactatggggcgccgctgccgccggccgagcgcatggagcactacgtgctgtacatggtcaacggcgagggccacgcctcctgcgaccaccgccagcgcggcttcaagcgctgggagtgcaaccggcccgcggcgcccggggggccgctcaagttctcggagaagttccagctcttcacgcccttctccctgggcttcgagttccggcccggccacgagtattactacatctgtgagtggggtcgggccggggctgccggggcccgagtgggcggggacgcgggggcggggccaggaagtgggcgggaccactggggtggggccggggagtgggcggggcagcgcagtgggcggggccgcggtgtggggccaggggggagtgggcggggccgcggaatggggccaggggggagtgggcggggccgcggagtggggccagggccggtgctggccactgacccaccccggtcactgaccccctccagatgtcaagtgcatgatggacgtgccattctcccaaccatcccgggaggccaggactttcctcgtccttcgttgcatatggggaaactgaggcttggagggggactgaggctgcactattgtgatctcgggcctccagctcagaccacttggtggttgggccagtagacctggctcagccccccgatagcgagaccagggtgcccgagccccagcacactgatgagggaaactgaggcatccggagcccagcaggggaggggagcttggtggaagccacagctaggctgagtgctggggcttactcctgcaatcccagcactttgggatgccgaggcgggaggatcacttgaggccagcgtggacaacgtagggagaccttctctctacaaaaacataaaaacaattagccaggtgtggtggcatgggcctgtggtcccagctgtgcagggggctgaggtgggagggctgcttggagtgcatgagctctggtcgctccactgcactccagcctgggtggcagagcgagaccctgtctttaaaagaagaaaaaaaccccacagggcccctgccgcaccagccgcacccagactgggtaggggtctccaggtcctccctgccccgcacccacccccgcatctccccgggacccatgccaggctcggagactccctgaggaccgtggggtcttcatctgaaggttgggtggcggcagccttggggatagtcacatctgcaggaccccatggtgggccaggctgggtgggccaggctgagggaggctgccagtccctgctgcttatcggaggtccgaagctggcctttttgtccctacgaaaggccaacggcaggtggggaacacagcagcgccagccggagtcccagtcctgcttggccatgatatctgtgaccttggcgggggaatgaggggccaggcactgcccacctgagatggggatgatggcatcacactcgtggcttccgccgtggcgctgagactgagggattctcgtggagtggggaccccggcttctcagcatctcggggcctgagggatggggagtcagggatctggggtctgtgcccccaggctgcaggggggccagtgcctggacacccagctcctgctgtgtgaaattaaactttacaaggccccattgcctcctttctctgctctagttggatttttcccttttaattcagggaagaagcgggtgggggacgggggaaggtgtttaaattaagtccccataatatgagaaaaattacatttttctttctgagacggcagtttcataaagataattattgtaattattcgtcctacctctgtgatgaatgttatttttattacatgctttttatcttcatcttccagtgtgaggggtttctagggggcgggcagaggtggtggccatgagagccaggccatcaggggcccagggcccggcagagacagcaagaccacatccatgtgtgcgtgcacatggacccacccctgttcgattgtccacacgtgtgcacaccccagcggccccggcttcaggcgtccttttcctcctctcttgatccttgcagacgcccccactgcactccaggatgcttctgggggcccgaaagcaggggcggtgatgctgg[156 bp omitted]tctactaaaaatacaaaaattagccaggcatggtggcacacatttgtaatcctgtttacttgggaggctgaggcaggagaattgcttgaacccgggaggctgagattgcagtgagccgagatcgtaccattgcactccagcctgggcgacaagagcaaagctccatcacaaaaaaaaaaaaaaaaaaaaaaaaaaagaatctttcccagagaatctactgtgttgccaggcgaggtccagagagggagcggcttgtccacaggctctcagaggcagagatttgaacccaggtcaatcatttcactattaatatatcacctctttgctgattgcttgaaaacaaatacatcattttccgagctcaccctgtgctgccctggggtgaggcagagcagaacaaaaacacagacacccccaggttctggggtcaggattggacagaaggaggagcagggggaatgtgcaggagactgctgggaaacagggggcattgtgtctggggctttgatgtacgattaggagttttaagggtggctctccacctggggtcagggttgattcaccaaggtggggaagggagtacagccccaggaggtctcaggcaccaagaggcacttccccactcatccccatcccctctcttctagctgccacgcctcccaatgctgtggaccggccctgcctgcgactgaaggtgtacgtgcggccgaccagtaagtgctcagggggatgggcaggatccaggcccccacccctgtgtcctaaacccacagaaccagtgagtgttcagaagagccaggacagggggcctcgggtttccctatcttgccctgccttgccccagcctcgatttccccgtctgatgaacatgtcagaccttcgagagtgaaggttagctgagcgcagtggctcacgcctataatcccagcacattgggatgctgaggtgggagaatcaattgagcccaggaggccgaggctgcagtgagcagagatcacgccactgcattccagcctgggtgacagagcaagactctgtctctaaaaaacaaagcaggccggttgggtggctcacgcctgtaatcccaactttgggagcctgaggcaggtggatcacctgaggtcaggagtttgagaccagcctggttaacatggcgaaaccccatctctactaaaaatacaaaatttagccgggcctggtggcgggctcctgtaatcccagctactcaggagactgaggcaggagaatcacttgaacccgggaagtggaggttgcagtgagcccagattgcgccactgctctccagtctgggtgatatagcaagactgcgtctaaaaaataaaataaaataaaaataaaaataaaaacagagtggccgggcacggtggctcacacctgtaatcccagcactttgggaggctgaggtgggtggaccccaaggtcaagagatggagaccgtcctggccaacatggtgaaaccccgtctctgctgaaaatacaaaattagccgggcgtggtggcacatgcctgtagtcccagctatttgggaggctgaagctggagaatcgcctgaacccgggaggcggaggttgcagtgagcccagattgcgccactgcacgccagcctggcgacggtgagactccgtctcaaaaaataaataaataaataaaaataaagcaaaaaaaaaaaaaaaaagattaaaagagtgaaggttgaattcaacagccaggtcccccacttcaggccaagtgactttgcccggagagtgggcatcggggatggcaccaagagggagcagagggcctgcctggtggggtgatgagcccgttgggcagatgtgcaccctgagggcgggcggcacgtggggagcccagtggggttcgggcggccgctgagcgtgctgtctctgccacccgcagacgagaccctgtacgaggctcctgagcccatcttcaccagcaataactcgtgtagcagcccgggcggctgccgcctcttcctcagcaccatccccgtgctctggaccctcctgggttcctagtcccagccccgcaggacgccgaccctgcctggacggccccgcctggaccgcctgacctcggccctccggacccggctgcggcccccgcctccgagaccaaatagagacgctgcttctccctcgcctggtgccgcccccgccgggcaggggccatccacccgccccaggaccagccctcagggaggggaaacggccgagagcccccccccggaggcccgaggggccggggtgtggatgcggaccgtggccaggccatctcctctggggcgtcggagaacccgggaacctcttggcgatttttttttttttttttttttttttttttttttttagtgtatttttcgtggttggatcaaaaagacttgagtttttaatttaatttattccctgccgttgtagcggggcggggtccctgtgccctggcctgggggaggggaacgcggaacatggggtcgggaacacagccgctcccctctgctctgcaccccactcgtgggggaacacagccgctcccctctgctctgcaccccactcgtgggggaacacagccgctcccctctgctctgcaccccactcgtgggggaacacagccgctcccctctgctctgcaccccactcgtgggggaacacagctgcagcccaccgcggacccccctggtgctccaggttgggtgagtctgagccggaaggggtacgtggtgggcgcccctcattgtggctggggagacctcataccccatcgcccacccccgtcctcctggtcatttcctcccagacactgttttgccccagcgcccttcggaatcacagtcccgccgtgtcttagaaactgctttggccgatgcaaacagccccctacccgtccccctcgcctcacacggtccctctccgaggccgagaagaccttctgttcctgtaaatacagccagcaagtgcaaactgtgattttattttccacgtattcctgaggacggactggaccgtctatgttttttcagcccttcatagggggtcttttattttggtgggggggtggggtggacttttagagtagaagctgcacttggcaataagctcgtgtcgtctgtcagagcccctctctcaactctgtgacctgataatgtttctaagaaaaagaaaaaaaggacaaaagggagggaaccactaccaaaaaaaaaaaaagaaactcctccccgaagacactttaatgaaggaaacaacacatttatacggatttcatatttctacccgcctttcctgactctgtgttttatatatattatatataaatatatattgtgtacggccgccggccggcggctcgaggcacgcccggtggtggggggtgggcagagggcttttgtagggggtcggcggggcgggccgcgttgccaggcctggagctggcgaccgggcctccctcttcccgtcacaatcaactttggattctgtatttttttataataaaatgagcataaacctcaaacgcgtgtgtctgtatgtgggggccttgccctacttgaaggagacttttgcattcctaatttggcggtggatgctgggcgtggtggtttactcctgtgattgcagcactttgggaggccgaggcgggcagatcgcttgaggtcaggagtttgaaaccagtctggccaacatggtgaaaccccatctctactaaaaatatgaaaaaaaaaaaaaaaaaagccaggtgaggtggtgcacgcctgtcatcccagctactcgggaggctgaggcaggagaacctcttgaacccgggagttggaggttgcagtgagctgagatcgtgcctttgccctccagcctcggcaacagagcgaaactctgtctcaaaaaggaaaaaaaaaattagctcggcgtggtggtgcacaactgtagacccagctactcgggaggctgaggtgagaggatggcttgagcccggcaggtggaggctacagggagctatgatcacaccactgcactccagcttgggcaacaaagcaagaccctgcctcaaataatagtaatagtaataataataataataatttagaggtgggtctggaatctactggggagaggggtgcggcttcgaggaacctctggggatccccagagctgtgaacctgactgattctttggttctgtgcatcgttttggggtcagaccttgggatgagcattttatagggcccgtatccttcatagccatccatgggcttcagtttccctctctgggaagtagcaacagcccacctagggctgggagggggcagctgggaggatggagggaggagacggggcctgtgcatggctggccctggggacaccgctggccggcacacacctgaacatggtggaattcctgggcctcaggatccaatcaaatgttgtgaaatctccactggcaagctctgcctctgtgtaactcagtttccccacctgctccaggccagggcaggggctctgtcatctcctaacctcttccccttgcaaacggcacatctgtaagttctcgggtcccaggggccttcatgccaggcacgccccgattgaagaaactgaggcacagagaggctgggggtgacgcggcaggtgacccggcccaggggactgaggtctttacggctggacgatggtcgcctgcatcccacccgccgtgacgacggcgtctccggcacaattagccgagcgggaacgctcccagctaattaattcagctgcgctgggcccggtgacgggggccgcctcctaatgaggcagcccaggcacaaagacccctgtgtgtgccccgccccgcccctgcccagcgcggggtggacgcacggaggcacagagggccggccggccaccgtgctgagcaccgcgggggaggctccaccatgccccactccacagaggaccccgaggctcagagagggaggcgacccccacagcccattcatgccgagacccccaccccaaactgcaacgtgaccactgggacagagaggaccaaggacagaatgagatcagggatcatgagaggcatcccagtgctgactgtgatgctgttacaaaaacacaatagtgtccttccctccattttaagtacaattgcatggattttagtgcattgagacttgtgcagccatcagctctgattccagaacattccatcaccccaaaaggaagccttgtccccatcagccgtcactccttatcccctcccctggcaccaacgtatcccctccttccctgtctctgtggatgggcctgtcctggacgtttcatggaaatgggtcacacactgtgtggccttgcgtgtctggcatctctcactgagtgtgacgtcctcaaggtgcatctgcgctgtggcctgggtcagagcctcgctccttttcacagctgagcacgttccggtgcgtggaaggaccacgctgtgtttatccaatcatctatccaggggcacttgggtactttccaccttttagctattatgacaattgttaaaaatacaatttattattattattgttttttgtagagatggggtcttgctatatttcctggctggtctcgaactcctgggctcaagtgatcctcccgccctggcctcccagagtgctgggggtgccaggcatggtagctcacccctgtaatctcaccattttcagagattgtctctaaaaaacaaagaacaaaaactcacaagccaaacttcttgtgattacagaagtgagccaccacgcccagccaagatgctttttttagatttattatttaactctgtattatttattagagacggggtctcactctgtcgcccaggctggagtgcagtggtgcgatcacggctcactgaaacctctggctcctgggctcaagcgatttgcctcccgcagcctctgagtagctggcactacgggcatattgtgacaatcttattatttttgagacaaagtttcaatgcaaaaggtgactttgctttttcgtttttgtttttgtgtttttttgagactgagtctctctgtcacccaggctggagtgtaatggcacgaacccggctcactgcagcctccgcctcccacgttcaagcaattctcctgcctcagattcccgagaagctgggattacaggtgtgtgccaactcgcccagctaatttttgtatttttagtagagatggggtttcaccatattggccaggctggtctcaaattcctgacctgaagtaatccacctgccttggcctccgaaagtgctgagaatacagacgtgagccactgcgcccagcctaaaaggtgactttgggtaaatacacaaagaatggctgagctcctgcctctgggcctttgcatgcactgtccccccagcccaccccactgccccgatgaacctctcttgcagattgcagccaggctcccccactcagccccttccaactcagctcagatgtcacctgagctcctggccaggaggctgtgggtgccctttgtgactgtttacttacctgactcctccccaggctgcagccgctaagggcagggctgggtctgtcctggttatcgccgggaccagtgctgggcccagagcagggaatctcctgggaccgtgtcattggccacacgcagacacgtgtacacacacacacgcgtagccctgcgcttgcacctccatgcctgtgtacccctgtgtcgccagacacatgtgttttgggcccgagcctctcaggaactgacctccactcccgcgccagaccctgaccagaccctggtgcctgtcccagtggctgcatcaacgtgtcgagtggccactcactccaggggctgtgctgggatgtccccgccgggtgtgggcgctccttggggaacctggttacccccgaccccagccccagtgagaccccaatgccggctcctgccagccctggacggccattggtacgctggtcccgcgcagagtcttttccgcccagaggatcctgagggaagtcatctccctcctgccggccagttactgccgcctcggtgcccgccgcgggcagggggcagcgggaggctgctaggggaaaggaggcctgaggcgcccaaaactcttgagtgcggcttggggtggaacgtgccgccccccacagccccggtggcccagggcagggctctgcatccccccagacctcaccactgagcctcagtgtgcctgtctacatctgtgtttgaggagaaaaccccttggtccccaccctctggtccaaacagccatgatggaggggggctcactttttttttgctttttagaaatggtgtctcattcttcaccctcaaaactgaacggaggctgggcatggtggctcctgcctgtaatcccagcaattttggagactgaggcaggctgattgctggaggccaggggttcaagaccagcctgggcaacagggtgagacccccaccaccaccatctcggcaaaataaaaattaaaaaattagccaggcatgctggcacgcacctctggttccagctactcgggaggcccagggggaaagatgctttgagcccaggaggttgagactgcattgagccatgatcacgccactgcactccagcctgggtgacagagccagaccctgtctcaaaaaacaaacaaacaaaaatactgaacagctcacaccagtaatcccagcactttgggaggccaaggcaggtagctcacttgaggtcaggagttcgagaccagcttggccaacatggtgaaaccttgtctctactaaaaatacaaaaattagccggccgtgatggcaggcgcctgtagtcccagctactcgggaaggctgaaacacaagaatcgccttgcagggatccaacagccacatggcagtaatgagaggctccagaaaagaaaagaaaacaaaacaaaacaaaaataagaaaaacaaacaaaataaggagaagaaaaaaaaaagaagcccccccccccaccatccccagaggccacagcactctgtcctctggtcccccaacccagccctgacacctgcttcttccccagggcacctctcactcacgggtgttccctctttgccctggctggcacacccttcccgagtctcctctgggctctccccacctttttttttttttttttttttttgagatgaaatttcgctcttgccgcccaggctggagtgcagtggggcgatctcggctcactgcaagctccgcctcccgggttcacaccattctcctgcctc[133 bp omitted]ctcgcctcccaaagtactgggattacaggcatgagccaccgcgcccggcctatttattttattttatttttttgagacagagtctcactctgtcgcccaggctggagtgcagtggcacgatctcagctaactgcaagctccgtctcccgggttcacgccattctcctgcctcagcctcccgagtggctgggactacaggcacccgccaccacgcccgctgttttttttttgtatttttagtagagaccgggtttcactgtgttagccaggatggtcttgatctcctgacctcgtgatctgcctgcctcggcctcccaaagtgctgggatgacaggcgtgagccaccgcgcccggccactggggccactttctatcaaccacacctggctcgggcatgcacctgccctcccccatgcatacaggcccacatccatgccttcaaatggccacaaaagtgtgcgtggccatagacatacatacttgcaagtgtttctctttttgttttttgttttttgttttttttgagacggagtcttgctctgtcacccaggctggagtgcaatggcacaatcgcagctcactgcaacctccgcctcctgggttcaactgattctcctgcctcagcctcctgagtagctgggattacaggtgcgtgccaccacacctggctaatttttgtatttttagtagagacagggtttcaccatgttggtcaggctggtctcaaacccctgacctcgtgatcctcccgcctcagcctcccaaagtgctgggatgacaggcgtgagccaccgcgcccggccttttttttttttttttttggacgcagtctcactctgtcgcccacgagtacagtggcgtgatctcagctcactgcaacctccgcctcccgggttcaagcgtttctcctgcctcagcttcccgagtggctgggactacaggcacgtaccaccacgacccgctttttttttttttttttttttgtatttttagtagagacgggttttctc[131 bp omitted]accgtgctacccaccatcgcgggcaggagaagcacgtcccgcgggtgcgtcttcaccacttccggcttctccgtgggcggcgcccccttcttggccttgcgcaggcgcttgagcagcgagcgctgcttccgccacaggcccgggttcagccgccgccggcgcgcgctgttcagctgcatccgctgctccgaggacatgtccagtagctggtccaggtccacgccgcgctgggtgaagttgcggaaggtctgtttcttctgctgctgtacctctgccgtcttgctgcatcctcagaatagctctccaggcccttctttatgagacagggtcttgcctttgttgcccaggctggaatgcagtggtgtgatcatggctcactgcagtcttgacttcttgggctcaagggatcctcctgcctcagcctcccgagtagctcgaaccacaggtgcacaccaccatacctggctaatttttgattatttgtagagatggggtcttgctacggtgcccaggctgatctcaaactcctgggcccaagggatcctcttgcctcggcctcctaaaatgctgggatcacaggcgtgggtcaccgtgcccggcaagctctgggtcctcctgcacggtcgcctggtggagcagaaaccaccgccagcggctccccgtctatttgtctgtgcacattcctgggctcagacggtggcttccgaggccggaacttcggagtcacctgctccgcacttgagtctggaacgtctcagaccggacccctccctttacagcctgagagagggagagaccctgcccaggcctcccaggggcctgcccacccgacagctcctgactcccccaccctcattggtccagaaatggaaggcttcggcccaggagcgatcaatgcaccctaatggacatgtgtcggggggggggggaggggcgctgagtcgcaggagacacccttccctgtgcagagggggaaactgaggccactcccaggccccatgggtcactggcccgaagcagtgtgagccctgccgggtcaggggttgcatctggagcagcccagggagaatgaggctggggacccttcattccgggggtcattagggacaccccaccaggctgtgtgtgcccagggtggtctcttccccagctccgactgccccgccgggttttggggcttacggttctgtcctgggctcaagtcctggctcccaccaggcactgtggggcatcccctctgggtctggggtccacagtgcctgtctccaggcgtgagagaagcttctagagacaatctgtgagcatctttcccatccctgcctctccccagctcaagctccgaagggaacgtggatggcaggagagaggagggaggcgtggggcgagtttatctctcactggctttctccgcccccacctggcctcccctggggcttctgtgattctttgttttttttttgaggcagggtgtttctctgtcccccaggctggagtgcaatggtgctatcgtggctcactgcagcctccacctcctaggctcaagcaatcctcccacctcagcctctcgcgagtggctgggaccacaggcacgcggctccatgctagctaattttttttattttttgtagagatgaggtctcgctgtgttgcccagactggtcttgaactcctggcctctggtgatccttccacctcagcctcttgggtagttgagactgcaggcatgagccaccacacgtggctaatttttgtttatttatttatttatttttgtagagatggggtttcaccatgttgcccagactggtttcccaactcctgagctcaagggatcctcccgccttggcctcccaaagtgctgggattacaggcatgagcccagtctgagacccactttgtagataaggaagatgaggtcagagaaggggagtgcccaggccctgggccccacagccgggacccctttagggtccagtggatggcgaaggggaggcggcctgaccactaccgactccagccagtcgccccagcctccagggagagcagcacaggtgcccagagaagcgacgaatctggatatttcttccccacatgaggaggagctgggggcacctgagtgggtggtctcggtgctgggcggtcctcatggccccctaagcgtcgaaaaccagagcttgttatgatcttgtgatgggaagggggcccgcctctcgcagggaccgctgtcggccccctctgcccgcccaccaggcgctagagttatggtttgcaatatcccatgcccctcccagcctgagcattaatgacggtggtatccgagtccccgagcacccggggctgttattaacatcgtccatcacgcttgtggctgcggctctagaagctctttggctaggaggggaaactgaggcaccgagaggttcgccttgacccctgcgtgagggcacagctgcagacatcggataagcccaggttccagtgccctctccaccacccgctgtgggtgaggcccctgttctctgagcctcagtttgctcatctggaaaacaggctagtgacacagggtggggtctcagatcctgggggctcttgatgagcagaatcgccaggcccatggaggcaggccctttgttgcctgatctccccgccttccctgtgatcccattgtctggcacaatgccagcaagccctcctcggatgtttgttgaatgactgaatgagcgtgttgtgtgtggactctgagtcaagtgctctttcttgccaactgggaaagactggaggcaaagggctcattctccatcattcactcctccaggaaggcctagggggcaggggtggtggtggggaacggcctctcgcaggtgaggggggcagcgggggaaccgcgggagtcagccgtgctggctggcagatctttaaattaaaatgcatatatacaccagataaataaactcggcccacatcctggtgacaggcagaattaagttgcccagttggggaccgggcagcgaaggctgggggtggaaggggatggggccgaattaccaagggcggcgactcagctccatcctctgccacattgtatcccatgaacgttcctgagacccctgtcctgccgggtctctgggaagcgctgagggggtcagggagtaaggacccaaattctgagccccaagttgggcacccaggatctggcccggcttagagagagaccagctgcccacggggtgccctgggtgagtcagtgtcttcgtctgaaacagggagaccatggccccccgtcccagcacagaggctgcccttggcagtgggcatggggcggacctggttcaagtcccggctgagcactcaagggctgggagcagcctccgtcgggtcaggtaccagggagaccccgttctagctcccagggaggcccccgtggggcccgcacagctgcagggtcctccctgggcccttccctctgacccaagcccaggggagaggggcggagggggcggcgggcagttttcaattacggagcagctaatctcccagtgagggccgttctggggcccagtaaatctattatgaaaagcctctaaatgtatgtaaaaccggcctccgacaatccggggattaggccgccgggaggggaaaccgaggcgcaggccgcctggcggattagcgcagcggggcccctggagggttggggggagcagtccccagaggtccagggcagagggagaggggtcctctgaagaagccagcacccattttatagctggggaaactgaggccggggaagggccccccccccccccccaccaggggtcccctctcagcgtcaagggcacttttgccagccgctcctgcctttgtcgcaaacccaggggtattttcccacaaggtggactcggtgggtttgaaagatggggagctggggacccctggacccggcttaaggctccgtggcccggcccgcatctcctgccgccgtcgcaggccctttgaagctgccccatcctttggtgcttttgaaatgtctttattaatcacctaccgtttgccaagccagaggtggcaaaggtaacaggagacgggagcccagtgccctggcagctcagggcactcgccaaagacgaaggcagccgggagaggccttccccaaggactcccgcttccgctgggaggtggggaggaggaggtcaccccacagaagtgcggtgaggccactgcaggcgcgagggaaggcctggtggccgaagggaggcgtgagctgagaagccccgtgcctgggctgctcctgagggtggcagggagccctcggagggcttgaacctaagtggcccctgcagcatccatggcgggaccgtggacctccaagcccgcctccctcggaagcacagcttcctcagcgtggccccacactctcccaggctcacccagccccctcgcatagggcctgctcaccctcctgcctgtggggcccttggtccagcagtttcctctcctgcacactgtccccacctgctgaagtccgtccaggagcccaggtgcatgatgggagggggtgatgcccctcctcacccccacctagtggagtttgcaggcagctctgcagatcgcctggcagctggagaaactgaggcataaggctgggcgtggtggctcacgcccgtaatcccagcactttgggaggacgaggctggtggatcacctgaggtcaggagtttgagaccagcctggctaacatggtggaaccccgtctctactaaaactacaaaaattagccgggcgtagtggcacgcacctgtaatctcaactactcgggaggctgaggcaggagaattgcttgaacccgggaggtggaggttgcagtgagccgagattgtgccattgcactccagtgtgggtgacaagagcgaaactccgtctcaaaaaaaaaaaaagaaaaaattgaggcatgagctgacagctgtttctgcaggcctcaggcagcacccgatggggccttcccagggcccctggcctggcccggctccagccaccagcttgtccctgcctcccaggtgctggggaatgaaagggaggcgagtgatttctctgactccttcaggcccaggcctccgaattcctccaactcccaggtgaggggttgtgcaaagctgcagcagggtgggaccgtcccagtgagggtgattctggagtcggccatggtgggcctgctctgtgacctgggagggggtgtgtgcctgtctgtgactcagtttcctcgtccgtgtcatcagcaacggccaaatgccgttcccagcactggatgggggtggagggcctgaggggtgtgggtgggggggagctccaggcgcccctgccccccgcccagccgtcagtcaggctggccgggcccccttcaagtcgtcacggcccagcagcggccacgggagggattattccggcctgtccagggtggactgaagtggaaccaaggctgacgagcggaacgcgcccccatggacccagcccgcccgcctttgtccgccgccagccccccacccgcctgccgtcacagaccccgcctcccgtgcctgagccccatttctctgggggccgggctgcctcgcgtggcccccgcctgactaaagccatgcagcttctcggccggctccatccgctggctgcctcagtttccccctctgcagcatgggcatacagggttcctctcgtcggctcattggctgctgaatgggggctgtgtgggcagaggctctcccggggctttcccagggtgctcgggggtccctctgcccggtccctccactgtgcctttgtccaggaaattcgaggtggcagggagaacggatccgctctcggcctgaacggagccgcggcaaatgctgttgacccctgaccccggccccctaatcccggggttgaggctctcaccggagaggggccctgggagatgagctggggcacgacccccgccccgggcaccgaggggggcttccaggtcagggtcggagaggcttcgggaggacgcggctgccccattggccacgtgcccggtcatcacctctcggaggccaacacgggaaactgaggcgtggaggagccctcctaagccccacagctctgggatgggagccaggcctagccacctgcagggagagagacacggccggcagctgcccctccctgagtcaccaaacaggaattccgggacgtctggctggccctggaaggcacggctagcttacaaacccccagtcttcaggaacctctctgggtacctggcccctgtgttccccggggaggccccaggatccccttgtctggaacagggggaggggcctttctggccaccctctgctgctctacatttacccagtgtcttcaggaggaagaaatgaatgaatgaatgaagtggaaggtgtcctcatgcctgccagctgctgcagtctagcccccgtgccttgtggctacttagaggcctcagctagcagcatccaccgcagattaaaagattctccgtcggaggctgggatgcgctcacacgcttgggcgcccctgcgctccccggtggccgtgtgtctgttccaccctgccgagctgttccccacgatcaatttcaatttggcctggtctctgcctctgcagcacgaccctccttgggggccgacggcggggaaggagttgctggcttccgcagctctccccccaggtccctgggaccctcgcctggtgaagagagagctctgctgggccgcctctttttccgggcctcagtttctctgggtttggaatgagggcacagggcagcgcagtgtggacccagcctggttttcatccaacctcatgaagtcactgaatgctcgccgtgggcctgaccctgggctgaaccctggggcaccgtgggggctacggcaggcaaacgagtcggaggcagaggaagggcgttcctgcaggggggaggctgtgtgcagaggggtagagggagggaggcaggagggagcgtcctggaagaaacagttaaggtggggccacagaggagggtggacaagcctaggcaacaatattcctcaacagccgaagtttgtgtatttgttttttgagacagagtctcactttgtcactcaggctggagtgcagtgagctgaggtgcgatctcagctcactgcagcctcaacctccctggctcaatcgatcctcccatctcagcctcccaagtaactgggaccacagttgtgtgccaccacgcccagctaatgtatttatttatttatttatttagagacagaatcgctctgtcgcccaggctggagtacaggggtgcaatctcggctcactgcaacctccacctcctgggttcgagtgcttctcctgcctcagcctcctgagtagctgggattacaggtgcaccccaccatgcctggcttatttatttgtttattatttatttatttttgagacagtcttgctctgtcactcaggctggagtgcagtaatgcgatctcagctcactgcaacctcgacctccctggctcaagtgagcctcccatctcagcctcccaagtaactgggaccacaggtgtgcaccaccacgcccggctaatttatttatttgtttatttagagacagagtcttgttctgtcgcccaggctggagtgcagtggtgcaatctcggctcactgcaacctccacttcctgggttcaagtgattctcctgcctcagcctcccgaggagctgggattacaggcacctgccaccacgcccggctaaattttgtaattttagtaga[144 bp omitted]gtgtaccaaacgtcagccgacaggctttccctgcctcatctccctgcaacctcccaaggatcctctaatacccattttacaaatgaggagacaggccacagacagaggccgctgtgaggtgagggaaggaggccacggccatgctggcattggcagcactggtccagctcagacctgtccaggtccccagcaggactgcggtgcgcctggctccttcctctgcgcgctccattcccttgctgcttccttccgggcctccaggcttccctccttttctagggtggcggtggaggaacctatatgggctcctgggtgctggagttcgatctgaaccttcccgctcattctgcgtgaccttgggggcgtgcctggccctcccgtgcctcagtttccccagccgcacctgccggactgtgaggccccgaccccccgccctctctggcccccccgcggctccgggctcaggccgccgctaggtggagcgaggaggccggtggagacgcggtgcggggagacgcgcgctcgggagctgcagaggccggggagcgggcctggcgcgcgggtagagctgcgtggacgcccgcggcccttggcgctcagagctcccgccccgcagccagcgcctctaggaggcccagccggacagtctgcgaggggcgcgctccgggcgcaggaggggcggtgtccggggcgcgtggtttgggtcgtcgggacctggatcccggagcaggcaggctgaggtctgcatggtcagggcggcctcaggtgctggggagccaccctggctggacctagggtcccagcttcacgttcacctcctggagcctcaggtctgggtctgatgccccaacgggaaccccaagccctgcccaccgcccgtcctcacctctgctgccccttcactgccccgaccagtggcttccgccataaccctcttgggagacccatttttcataggaggaaactgaggcacagagcgttttctcggtcacagaacagctggatccctcctgtgtgatgagcacctctgggtcctcctgtgtcgtgaccacacctgtgtccactttctgggtcctgggctgcagaatgtcaccgccccaaataccctctcgtgggtgctgtggttggtttccttggccttgggagggtcctttctactcaggtagggataccgtctgggttccccccctactgcccctgcaaggcagggctggtgatccgtgtgcaccctgggggccgtctcatgtgtggctgcaccttcccacaccacggctgaggagaggatcctacccacaggtgcccctggtgggttcagccggcccctgccgcgggatcctgcttgatttctggtactccaggcctcgccactgtcattcccgctgggcatgatgcgcacctgctgtgccatgctcttgggcagctctctggggtcacggaaacttctgtgcctcagttgcctcctctggaatgtgcaaatccttcgagaaataagctggaagacctgggagcaagcaggcttgggtttccaggtttggggggggggtgcccagatacaaccccaaggctttgggaggtgaggggacaccctgctgctccatctggacccgcgcccgtgagctctgctgctctgcgcctgacccacagctctgtccacttgccccatatggg[138 bp omitted]cgtagtgaaacctcatctctactgaaaatgcaaaaattagccaggtgtgatggtgtgggcctgtaatcccagctactcaggaggctgaggtagaagaattgcttgaacctgagagagggaggttgcattgagccgagatatcgtgccactgcactttagcctgggggatagagtgggagggatcgatccagccctctttcatccccttcccgctcactccgacccaacctcccagttctgtctttaaaacaagctgcttttgtctctgccccagggcctttgcacgggctgctccatccctgcatgtggccagcccagcagctccctcactgcccacctgtggccggctgcatccctccaatcttcagacacccatttttttttctttttcttttctgttttattttttttgagatggtgggggtggtctcggtatgttgcccaggctggtctccaactcctgagctcaagtgatcctcccacctcggtctcccaaagtgctgggatcacaggcatgagccacctcgcctggtcttgacacttattttcatgttcagtttgaccatatttgtgacaagtcagagacgatacagcaaggggaagaagacacgttcccttccctctagaaagtcacagtcacgcacagaaggcagaaggcttgcagtgcacagcgacgggataaaggaaccagctctgcaacagagtgagtggctctgagcttttgatcattgagatataattcacagaccatgaggttcacctgcttaaagcactgagctataactcgcggaccatgaggttcacctgcttaaaggtgtaatccagtggcttttagcgtacttgcagagttgtgcaaacctcacctctctctagttccagaacgttctcatcaccccagaaggaaaccccatccccattagccattgctccccatccccaccccagccctggcacccaggcatcccctctctgcctctgtgggttggcctgtcctggacacttcatagaaatgagatcacagactgggtgtggtggctcacatgcctgtactcccagcactttgggaggccg[132 bp omitted]ggctgaggcagggagaattgcttgaacctgggaggcagaggtttcagtgagccaagattgtgctgctgctgtccagcatgggcaacagagcaagactctgtctcaaaaaaaaaaaagaaaactgaaactcagacagcgaccctcctctgcctcagtcctgcggtggctccatgtgccccaggattaacgcacactccccggcctggcggcacactttgctgggcacggggcgagaccagaagaacccaaagaggccagagggtcccagctcagcgaggagtgggaggtgcttccttctacccagataagagcctgggagagctgggagagtgggaagtggggtcgccccgattttccagggcaggaaaccaaggctggggccttgggctaacacccacgtcaggccccgggtctcgctgcccagaggctccggtgagtgaagctcctggcagcgtgcacctgcgcccgccggacccgcctcccacctgccattcctgccggggagggaagggccactgtgggcggctcagggcccccaccgctgtttccgggctcttggtggggtggggagggccgctgtcagagaccccctgagaccctcgggaacactgcctgcctaatgaggatccctggggcctctgcccagttcgggccggggaataaaggcctcctcttccattccgctgtttctccgccccccgccgtaataggattgagacttttgaagttaataggaaatgaggcaggctcccacgtacagaatgcggacgcggagggcttagagggccctttgtgagcccggccgggcggctccccccgccggccggccgtgatgaaagcaccgtgaaatatacagtggcaggacgccccttgaccctgacaggcctcttaaagaaaagaaggggggaaaatcccccagcagttgtacatgtgcatgtgaacacacgtgtgtgtgtatgcagcgctctggcccggccggccactgggacgctgtctgcacggcgcccacgcggggcctcggctcagcca[131 bp omitted]tcactgcaacctccgcctcccaggttcaagctattctcctgcctcagccttcctgagtagctgggattataggcatgcgccaccatgcccggctaattttgtgtttttagtagagatggggtttctccatgttagtcaggctggtctcgaactcccgacctcagatgatccgcctgcctcggcctcccaaagcgccgggattacaggcatgagccaccgtgcccggcctgtttgttttttttttgagatggagtctctgtcacccaggctggaatgtagtggcgcaatccctgctcactgccacctctgcctcccaggttcaagcgattctcctgcctcagcctcccaagtagagtagctgggattacaggcacctgtcaccatacccagctaattttttttttttgtattttagtagagacggggttttgccatgttggccaggctggtctcgaactcctgacctcaagtgatccacccaccttggcctcccaaagtgctgggattacaggctcgagccactgcgcccagctgagtttggggttttggatgctgggcctgagagtcagaggccattcatcactcagggcagacagccccacccaaggctcggtcttctctactaacacacctccagagacggcaggcttaccacttagcaagactcctagacaaggcttctttgcgtgtggctccagaggaaggtgaagatgacacctttcaatgtcactaaggaaaagtgacaagggacagaagggaaggcaattttttttttttgagacatggtctcactcccattgcccaagctggagttcagtggttctgtatcacctcattgcagcctccacctcctgggctcaagtgatcctcccatctcattttttcatttttttgtagagatagggtctcactacattgcccagactggtctcgaactcctgggcttaagggatcctcccacctcagcctcccaaaatgttgggattacaggcgtgagccaccgctcctgcctcagcctccacagtagctgggattacaggtgcctgccaccatgcccagctaatttttgtatttttggtagagacagggtttcatcatgttggccaggctggtctcaaattcctgacctcaggtgatctgcccgcctcagcctcccaaagtgctgggattacaggtgtgagccactgcgcccggcccaagaaggcaatttctaaaacagctttattgagttattcacatagcatacagttcattcatttaaagtatacaatttttttttctttgtatttttagtaga[244 bp omitted]tgcctcagtctcctgagtagctgggactacaggcgccttccaccacgcctggctattttttttttttttttttttaattagagacagggtttcacggtgttagccaggatggtctcaatctcctgacctcgtgatccacccacctcggtcggcctcccaaagtgctgggattataggtgtgagccaccgtgccctgccttgatttcttttattgtcttcataaagctgtgtgtccatcaacccaatcaactttagaacatttccatcattccaaaaggaaaccccgttccctccccagccctggcacccacacttcccctccctgtctctgtggatctgcctgccctggacatttcatagaaatgggattgcacacctgtggccttctgtgtctggcgtctctcactgagtgtggcgtcctcaggatgcatctgcgctgtggcctgggtcagagcctcgctccttttcacggctcagtcgtgttccagtgggcagagggccatgccgtgtttgcccattcttgtgttgatggacatttgggctgtttcagacgtttctgagtgtgtagggaatgctgttcttgccaactcttccagtggccctggatttgggcctttgaccctcacagaaggccaagcagaggctgggcaggtcccaccaaggccagaagcagagggcgtgttccccagcagggcctggtgtttggagcatgacacatggaaacagcttccaggcatgaccctgtgtctcccagctggccctgccacttctggaggtgaccctgccaccctgtgactctgtttctccgtcggcaaaggcggcggtgatggggactctgtggtggcagctattgtcaggcagcatggcagctgcacacgggggctcgcccatgtgagggaggctttccgcaggtggtccctgtccctgtccctgttcgcatggtcctgcagacggccgtctcacccccataccactggcgttggagggcagattgggcgtgaggagagggtgaatctgtgtccagggctccccagttttccgttcagacccgtggggaggcgactttcccgctgtgggctccagcatcgggaggggtggtctgtgtggagtgacgtgtggccctgtccccgctacgagaaatcccggggaaaggaggggtgaagggggcgggagggggttcctggaatctggctgagcttgggtggcacccaaggatgcctgcagcccgcccagtggcacgggaagccccctcacccgctggctggaaggggtgggaggcaagtggcaggaggcaggtggatgggttgcctgttcttccctgggggcgccaggggaagacctgtccctgccagagcaccgcggctggcagcccccagccctttggtggcagctatgccctggggtgggcagggtgatgcgtaggtcatctgcccctgtggtgggcccagcgccctcctgtcttctcagaccctccagaggaggcaaaggaggtctctcaggcagagcgagaacatgtcattccttcagggacagcagaaccaccacaggtactgcccacctgggtcagacatcagagggacagagacagagagacagagacagtcagagacagagagacaaagggagacagagagagacagacgcaggcagacagagtcagagatggagggaggaagagacggagagacagtgacagagacagaaggagacagagacagagagacagagacagagggagacagagagacagagatgggggagacagacaaaaacagagagacaaagacagagacagagggaaacagagagagggagagacagaaatagagataaacagagacagagagggaaggagacagagaaagagacagagagacagagggagacagagatagatcgagtcggacagagacagagaaagagacacagagagacagagggatacagagatacagcaagtcggagagagacagagagacatggggagacagaggcagcgcaggggcggctgtgcagggcgatgggccgagggctccatcccggccttcctggcccctgggccccccgcctcccagctgtgactggcctgctctggccttgggctccgcctgacttttctgggtttggggttgagggtgcaggaggccctggcagggcaggactctgggtccccaggggccgcctcaccatcctgcccccggggtcacagaacttgggcatctccccatcagtgggcgacacgggcccagcagggactcgggaaggggctggggcaccctgggctctgctcagcccgtgtcccaggagcttggcaaggggcgcacagccagcccacagctaactgctgaggggaaccctcctctcccaggtgccagcccaggtgggggcagggagcctcaggccctaccctcgggtgctcacagcgtctcctggacttagcagaggtcggtgaggcccgaggaagcttcatgctggggtctcggtgcaggaggtggaggggggatgggaaaaggcttgaagggagggcccggatccatcaatggacactgaggctgcttggtgtctcctggaagatctgttcacatcctggcccct[145 bp omitted]aaccccgtctctatgaaaaatacaaaaacaaaattagccgggcgtggtggcggcaggcgcctgtagtcccagctactcgggaggctgaggcaggagaatggtgtgaacccggaaggcggcgcttgcagtgagccgagatcgcgccaccgcactccaacctgggcgacacagcgacactccgtctcaaaaaaaaaaaaaaaaaaatagggccttggcagatgtgaccgagttatgacgaggtcgttcgagtgggcctggcgcagcgtgactggcatccatataaaatacacatgcattgattgggcactggtgaaagggaactacctcagtccccacctcaggatgtcgcataaccggtgtttatggcaccaaaaacttcatctctgtaaaccacttggaggggtgtctggcaccaagtccatgtccatgagtgtctgaaaatagcataaaaataaaatagaaaaaaagaaagagctggtgcctaccctcggggagcctacaggacgtgagcttgaaagagctggttatctccccgtctctctgtctctctctgtcttggaaatgtctaagggggcaggcaggagggcttcctggaggaggggtcctttgagctgagttcagaagggcgagaaggagccaggtttctcatggagcagccaatgcaaagggctgggggccacctggagcctggtgtgtccttcgggcagctggtgtggctggagcaggggatgccaagcctgctgagggcttcatgggccgcagggaggagtttggtttttctcctgagggcactggggagccacagcagagtttagagcagaagaaggacacaatttgtgccctgtgcccgtggtgagcggcgagcagggagggctgcctggaggcgggtaaggacctcagagcggaattctgccacagtgaagctttggaggaaatctttcttccttttctcttcttttcccatcacgggttgagaaattggagggaggggcattgctggggcttcctgtgcccgcgtgtgcggggggttctggggcctgctgcctgcctgagccagccccttttcccgccagaggcctctcgtcagtccccgggggggcccagtggtgaccttgggcctcggggaacatccagacctgggtcagtggcctcggcaagtgcccgggggatccgccctccggtccccgtgccagtttccacagcgggacaggggggtcccgggggccgggagtccgcagccccgaagacctacgctgccgccagccacacccctgggggtccgaccctcctgggtcccactttacagatggaggaactgaggcggtgactctaatcttcgcccggcctgagtcgcggggctggaacccgcagcgtttgccgattcccagggcccgagcgctccggcgagtgtgtgtgtaacgccctctccctggacgcctcgagtttaggaaacggcggagccgcccggattgaaattctcggcccgtgcacgcccggcggagaaatccatgacgcattgtttagacagacgcctttaaaccgcgccgcggcggggggcggcggccgggggcgcctgcgcggggaaggtcaccctttttttctgcacaaaggtcagccgtagaccgttgccaagacaacggccggcgtaaagatggaggcttaaggagaacagacagttcccctcccgaagatgccccgtgcaaagggcccggccgtgggcttgggaggctcagggggtgtgaggagctgagcgccggagcagagagagcggagagtggggcgctgggatggctctgggaggccaggaaggaatgcgggggcctggggggcagatcttggctcaggccctgccaggctgtcttcaaaccaatgagcctcagggttcctggctgtgaaatgggaacaacgtctgcccttcagggtaggcatctccaggctggtctggtgtgggaaccgctgtgttaaacatgcagactccagccaggcgccgtggctcacaccaacggggcacagtggctcacaccaacagggcacagtagctcacacccgccgggcacggtggttcacaccagccgggcacggtggctcacacccgccgggcacagtggttcacgccagccaggcacagtggctcaaacccgctgggcacagtggctcacaccaacggggcacagtggctcacacccgccgggcacggtggttcacaccagccgggcacggtggctcacaccagccgggcacagtggctcacacccgccgggcacagtggttcacaccagccgggcacagtggctcaaacccgctgggcacagtggctcacaccaacagggcacagtggcccacgccagccgggcacggtggctcacgctaacagggcagagtggttcacgctagccgggcatggtggcagtatgccagccgggtacagtggctcacgcttgtcatctcagcactttggtgtttgtttgtttgtttgtttttgagatagtctcactctgtcgcccaggctggactgtagtgacaagatctgggctcattgcaacctccgcctcccgggttcaagcgattctactgcctcagcctcccaagtagctgggactacaggcatgtgccatcacgcctagctaattttttgtacttttagtagagacgcggttgcaccattttggccaggctggtcttgaactcctgacctcgttatccacccgcctcggcctcccgaagtgctgggattacaagtgtgagccaccgcgcccagcctcatctcagcactttaggaggctgaggcgggaggactgcttgagtccaggagtttaagacgagctgggcaacatagtgcaatcctgtctttattttaaaaaatacaaaaaaattagctgtgcatggtggtgtgcatgtgcagtccagtcccacgtactcaagaggctgaggtgggaggatcttgggagcccaggaggtcacagctgcagtgagccatgattatgtcactgcactccagcctgggtgacagagcaagaccctgtctcaaaaaggcagattcggccgggtgcggtggctcacgcctggaatcccagcacttcgggaggccgaggtgggcggatcaccaggtcaggagatcgagaccatcctggctaacacggtgaaaccccgtctctactaaaaataaaaaaatcagccgggcgtggtggtgggcgcctgtagtcccagctacttgggaggctgagacaggagaatggcgtgaacccgggaggtggagcttgcagcgagccgagattctgccactgcactccagcctgggtgacagagcgagactccgtctcaaaaaaaaaaaaaaaaaatgctgattcataggccctccagggggctcgggctccagaaaggctgggggtcttggtcagcatcctaggtgtcccctgatcaccgccagaggtcccatgagtgtgagctgggactccgaggaggcttggtttctcctacccccttccccgagctggagccggaagcccagtggcccctctgggccggaagcagactggaggctcagatttgcaaacctgagaacagaggtcccgggagcaatgaggtgggcctgagaccctcgctcagaggtggctgcttctcgatctgcaggatctgagggccttggcggccagcagggacgtggccaggagctggcctcggctttggggactcaaggtctttgctgtcatagctttttggtagctacataaaaatggtgctgttcacacaaaccaatctccctggaggtgcttttaaggactgatgagagccacacgccctgattaccatttcatttaccggcgaacctgccttacctttgcgacagagaggacatcaggaaggtgacttttattgaggtgaaattcacacgatgcaaaagtaaccattttaaagtaaacttaatgacctgcgtcagcctcactcccattccctgccccagccctgacgctacgcaaccactttcttcttttatttatttatttatttattttttgagacagagtctttctctgtaacccaggctggagtgcagtggcacgatctcagctcactgcaacctccaccttccggattcaagcaattctcctgcctcagcctcccgagtagctgggactacaggtgcccgccaccacacccggctattttgtatctttagtagagacggggtttcaccgtgttggccaggctggtctccaacgcctgacctcaagttatccacccaccttggcctcctgaagtgttgagattacaggcgtgagccacctcacccagccgagcagtttttaatttttggaaaatgtgtacctccactgtgagaggcgtctgtgtgtgcgtgttgtggtttgagtgccctgaattagttaaaggcactccttcttctctgcggttccctgcagacctgaccgtctgtgattctgcagatgtcagggctgtacagaagagggtggaggccgggccagccccagctcctgctcacacagggaattagtgtcagagctgggctggggtcgagaggtgggctgctgggacatccgccctttcacccccatgctgactccaacatcagattgctgtcagcctggctgtccgaaaaagaacggacctggggccgggcgcagtggctcacgcctgtaatcccagctactcaaaaggctgaggcagaagaatcgcttgaaccagggaggcggaggttgcagtgagccgacatcgtgccactgcattccagccggggtgacagagtgagaccccatctcaaaaaagaaaaagaaaaaaaaaaagggccgggcgcagtggctcatgcctgtaatcccagcactttgggaggccaagaccggctgatcacgaggtcaggagatcgaggccatcctggctaacacagtaaaacctcgtccctactaaaaataaaaaaaattagccaggcgtggtcgagggcacctgtagtcccagctactcgggaggctgaggcagaatggtgtgaacccaggaggcggagcttgcagtgagccgagatcgtgccactgcactctagcctgggcgacagagcgagactccgtctcaaaacaaacaaacaaacaaacaaaaagactgggcacggtggctcaggcctgtaatcccagcactttgggaggccaaggctggcagatcacctgaggtcaggagtttgagaccagcctggccaacccaattttttttctctactgaaaaaaaaaaaaaaaaaaatatatatatatatatataggaggctgaggcaggagaatcgcttgaatcaggaggcagaggttgtagtgagccgagattgtgccactgcactccatcgtgggcaagagagggagactctgtctcaaaaaaaacaaacctagaaaaattagctgggcatggtggtgggcacctgtaatcccagctacttgggaggc[136 bp omitted]ttctcgccaattaggacaggacatcgggaacctagaaaatttgaccaacacggaaaagcaccccaaaccaaaccacacagcaacagcaaaactcagactcttagcacctccacccagaaccagtactgtttatacgattccagtcacgacccggcatgtgtcgggtgtggacgcatacgcatgcacctgcttttctcaaagagtgatgttttagctgctaatttgtacctatttatcacttaacactgcattaatatcactgctcttttcccatgtaaactagtcttctgggacagaatttgtttttatttttattacaaaaattttttttgagacagaggctctatcgtccaggctggaatgcagtggcatgatcgcatctcactgcaacctctgtctcccaggttcaaacgattctcctacctcagcctcccgagtagctgggattacaggtgcataccacccccccactaatttttgtacatttactagagacaaggtttcaccatgttggacaggctggtctcgaactcctgacctcaggtgatccacgcaccttggcctcccaaagggctgggattacaggcatgaactaccgtgcccagccttatttttactttcagagatgggagtctcactgtgttgcccaggttggcctcaaactcccgggctcaagtgatcctcctgcctcggcttcccaaagtgctgggattacaggcgtgagtcactgcgcccggccctgaagtttttttttttttttttttttgagacggagtcttgctcttttgcccaggctggagtgcagtggtgcgatctcggctcactgcaagctccacctcctgggtttacgccattctcctgcctcagcctcccgagtagctgggactacaggcgtccgccaccgtgcccagctaa[143 bp omitted]tttttaatctttggcttctcgcaaggtgctgcttccttttaccttctagaatgttctccgccacaaaaaagattaaagtctccaacaacaaaacaaaacaaaaaacacttccaaactgcaactcattgagagatggcagaggcttgtttcagattccagttgggaaggggaggtagggtgggtgcttctccgagaaagcccctggtgtgggggaggtgggctgaggttggagagggggtacccacagcggccaggtgggaagaagcctgcctgggagccgaggtctccacgtggccgccatggactgggggtcactctgcgcctgagatgtcttcagagactccagctataaaaagctgtgtggggctgggcgtggtggctcacagccacctgtaatcctggaactttgggaggctgaggtgggcggatcatgaggtcaggagtttgagaccatcctggccaacatgctgaaaccctttctctactaaaaatacaaaaaatagccgggcacggtggctcacgcctgtaatcccagccctttgggaggccgagatgggcagatcacctgaggtcaggagttcgggaccagcctgaccaacatggaaaaaccccgtctctactaaaaatacaaaattggccgggtgcggtggctcacacctgtaatcccagcactttgggaggctgaggtgggcggatcacgaggtcaggagttcgagaccatcctcgccaacatggtgaaaccctgtctctacaaaaaatacaaaaaatggctgggcgcagtg[131 bp omitted]gtggtgggcagctgtagtcccagctactcgggagcctgagg[134 bp omitted]cctccggggcacgctgggcctccggagtctggagtgggggctaggggctgcctggggaggggctggaagggaagcagcagacaatgggctgggctgcacccctcccccggttccagttccccccaaatcagacggacacggctgcagaaagctgcggcctctcacgcggccaggcgcggggcgcacaatgcttgctgtcgtcccgtgttttctgctgtccccgcctccgttgtctgggtcccctggggcagctgtggaaattgggggttgagagcccttccaggcaggctatctttgtggctgtttcaagcatcctttgggagacagtaggggacaccttcccttccgccctctggacgaggcaggggtgacagcgtcggtgcgtgtactgggctctcgggaaggaggagggggcccggctcctggtcccttgtcccttgtccctgctcagtcctggttgcaggcattgtgggcaccacccgtgctgcccacaggaagatcattgtccgtagcagcatcctgagctgtgacctgcgtttatttccccatggggacgtggggtctccctgatgtcaagagaggcggtgtcacacaggcatttaacatgccactgccatgattgggactgggattgggaccagcacagccccttgggggatgtggcggtgtggtgggagaggggcttgggaacccaccagcagcctagccctggaagctgcgtgttgtagattatggaaaatgctgcagcactcagaacgagacatctgaaaatggtgttgaaagaaaacaaggacctgtcacttctgtgaatgtccccagcaaggactctcaggctatgatgagttggtttttttttttttttttttttttgagatggaatcttgctctgtcgccgtggctggagtgcagtggtgcaatctcggctcatcgcaacctctgcctctcgggttcaagtgattctcccacctcatcctcctgagtagctggaattacaggcacctgccaccacgcccagctaatttttatatttttagtagaaacagggtttcaccatc[137 bp omitted]ttttattatttatttatttattattattttttttttagatggagtctcactctgtcacccaggccggaatgcagtggcacgatcttggctcactgcaacctccaacttctaggttcaagtgattctcctgcctc[133 bp omitted]cagcctcccaaagtgctgggattacaggtgtgagccaccacgcccagcctcaaaaaaaaatttttcaaattaaatttaaaaaaaaacaaacccagtctgggcacggtggctcacacctataatcctagtagtttgggaagctgaggcaggtggatcacttgaggtcaggagtttgagaccagcctgggcaacacagaaaaaccccatctctacaaaaaagaaaacatgagctgggtgtgatggtccacgcctctaatcccagctacttggtaggctgacgtgggaggatcacttgagcccaggaggttgaggctgcagtgagccatgattttgccactgcactccagcctaggcaacggagcaagactctgcctgaaaaaaaaaaaggatttgtctgtgtctacgcgcgtgtgtgttttgctcttgttgcccaggctggagtgcagtggcgcaatctcggctcactgcaacctccggctcccaagttcaagtgattttcctgcctcagcctcctgagtagctgggattacagacatgcgccaccacgcccggtaatttttgtatttttagtacagacagggtttctccatgttggccagggtggtctggaactcccaacctcaggtgatccgcccacctcggcctcccaaagtgttgggattacaggggcatgagccacggtgcccagccacatttatgtatttattaaataaaatagctgggcaccgtggctcgtgcctgtaatcccggcactttgggaggcccagatcagcagcgctttgcacgttgtgcctgttggcctcggtttccccggtaaaacttgtgatggttgcatgaagcccagatccatgaataaaacacgaggtctggagttagtgcttcctctcctacagcgaatgcataatcagcccacaactgcggcgacgaggcgtccgaggcggccgcaccccagcagcgatcggtgattcatggctcgatctgctaattgcctctcgggccggcttcgggctgatgcgtttgacaaggcgaggaggctgagacgtgcattaggcactcagccgcccccgccgcccatggagggcgcgactgctgctccctcttgggggtgatccgtcatttcatccacgggggagttggggacctggggggcaagagagaggctggatgcctgggccctgtttgtaaacagcgttgatttctgagctgagatgtggcgaccaggcccggagcagggctgtattcacagtcgtcgaggggtctgccggccgtggccctgctatggaaccttgggtggggctggggaacaggacc[174 bp omitted]gtggcgggcgcctgtagtcccagctactctggaggctgaggcaggagaatggcgtgaacccgggaggcggagcttgcagtgagccgagatcacgccactgcactccagcctgggggacagagcgagactccgtctcaaaaaaaaacaacaacaaaaaaagacaggccctcctgccaaggagaacgccagctgccggccgcagtcatttgtctgtcacttggatgcatgcagagcggggtctccggagggtggctggtgccggaacctgctgccacttacagggccctggtccccgtggatgctccagcttctccttagagctcccggctaagatggacccgcaagtgtgttttgttgttgttgctatttttggagacggagtttcactctgtcgcccaggatggagtgcggtggcgtgatcttggcccactgcaacctccatctcccgggttcaagcaattctcctgcctcagcgacctgagtagctgggattacaggcatgcgccgccaccgcacccagctaatttttgtattttttaatagagacggggtttcacctgttggccaggctggtctgaaactcctgacctcaggtgatctgcctgccttggcctcccaaagtgctgggattacaggcataatttttgtattttttagtagagatggggtttcaccatgttggccaggctggtctcgaactcctgacctcaggtgatctgcctgccttggcctcccaaagtgctgagattacaggcataatttttgtattttttagtagagatggggtttcaccatgttggccaggctggtctcgaactcctgacctcaggtgatgtgccagcctcggcctcccacactgttaggatcgcaggtggatcgcagagtcttgctctgttgctcaggctggagtgcagtggcaaaatcatggcttactgagccaccgcgcccggcttgtcccgtattcttattgctacgtccggcagcgctgtctggacaggcctaggacctgctatctccttgggtcaggctcaggcctctttgtccacttctgagctcctcctggcacgtactctgtggaatgaagcctggagcagctctaatttttttttttttttttttttttgagacggagtcttgctctgtcacccaggctggagttcagtggcgcagtctcagctcactgcaagctccgcctcccaggttcacgccattctcctgcctcagcctcccgagtagctgggattacaggcacccgccaccacacctggctaattttttgtatttttttagtagagacggggtttcaccatgttagccaggatggtctcaatctcctgatctcgtgatccaccctcctcggcctcccaaagtgctgggattataggcgtgtgccaccgcacccggccctggagcagctcttgaggtgtgttggccccttgggcccactggccctgggtcaccttgggtgtccacccacagtggtgcagcaggaggccattctcagcaagacccgctctcatcccagcgtcgctcaacagctgctgagaacgccctctgctcccggtgggagaaggggctggtggcacctgaggaccctggcccgagggagccctggagatgctgtgggttcccacatctagggatgctggtaaagctttgcacaggcctggcaaggaggaagcggactcctcaccctgccgggcactaggcaggtccccaaatagcatcagagaaacctgcttccccaaacgaacactgagtgaagccgtcatttgcccggaggtgaaaatgtaaatggtttcaaaatagatttggggccagcgtgggcgacagacacagacaggcacacacatgggctacccgggctggggtgcgatgacgccgttgcccctggttacagaaaggcaaccccccagctcagcacaggccgggggccaccacccaaacacggtcaccagcagcggcaggagggaagcaaggagaccaccttttcccggggccaggagaccaggtcatgcctccaaaggctccagcttgggctacctgtgccattagcgagtgcctctcagctgccccccgggagtcagcaggctgactgccccacggcggaggaatggcggggctgtttaaagcactctgtggaacttttcttcttcttcctattattatttatttattttatttttcagatgaagtctcgctccgtcgcccagaccggagtgcagtggcgggatcttggctcactgcaacctccacctcctgggttcgagcaattctcctgcttcagcctcccaagtagctgggattacaggcgcgcgccaccacacccatctaatttttgtgtttttagtagagacgggtttcaccatgttggccaggctggtctcgaactcctgacgtcaagtgatccgcccacctcggcctcccaaagtgctgggagtacaggcgtgagacaccggacctggcccttcttctttctattattaatagactttatcttatttttattatttatttattattttccttttctttttgagacagggtctcactctgtcacccaggctggagtacagtagaacaatcttggctcactgcaacctcgacctcctggggctcaagtgatcctccagtctcagcctcccgagtagctgggattacaggcgcctgacaccacacctggctaatttttgtgtttttagtagagatggggtttcgccatgttggccaggctagtctcgaactcctgagctcaggcgatccacccacctcggcctcccaaagtgctgggattccaggcatgcactattatgactggttactttgactttttcttaaaaatggggtctcaccatattgcccaggctagactcaaattcctgggcttgaccgtggttggtgactttcgcctttaatgtgaacactttgggaggcagaggtgggaagagtgcttgaggccaggagttcaagaacagcctgggtaacattgtgagaccccccatctcaatttttattaaaaagaaggaaaacaaaaaaattaaaaaactcctaggctcaagtgatcctcctgcctcggcctccctggtagaatagattttttaaacaatttttgggccaggcaccgtggctcacgcctgtaatcccaacactttgggaagctgaggcgggtggatcacctgaggtcaggagcttgagaccagcctggccgacatggtgaaatcccgtctccactaaaaatacaaaaattagctgtgcgtggtggtgcatgcctgtagtcccagctattcaggaggctgaggcagcagaatcacttgaacccaggaggcgcagattgcagtgagccgagatcgcgccattgcactccagcctgggcaacagagcgagacagggcctcactctgtcccccaggctagagtgcggtggcacgatctcggctcactacagcctcgactccggcctccgtctcctgagtagctgggactacaggcgcccaccaccatggccagctaattttttccattttttaaggagccaagtctcactatgttgcctgggctgagcccgaactccggggctcaagcaatccgcccacttcagcctcccaaagtgctgggattacaggtgtgagccaccaccccagccggtttctcccttttagaaaatttaccactaggagccaaaatattttttcccaagctcgttagccctttgacttctgttaccatcctcctcatcttttccgaacgaccacttctcttgtcatgagctgacacagctctctgggatggggttattaagccctttccagcaaaaactgcaagtatgtttcccagctgggagggtgctaaggcatgtgttactctggtcctgctcctgtgatacattgtctcccaactccggagaaggaggtcagggtttcagttcctgggtctgtttctagggatgccaggtgggagtatggttttagaaaagcaacttggggccgggtgcggtggcccacacctgtaatcccagcattttgggaggctgaggagggtggatcacctgaggtcaggagttcaagaccagcctggccaacatagtaaaaccccgtctctactaaaaatacaaatattagctgggcgtggtggtgggcacctgaagtcccaagtactcgggacgctgagacaggagaatcacttgaacccaggaggttcatcccaggaggttacagagctcagatcgtgccactgcactccagcctgggcaacagagcgagactctgtctcaaaaaagctgggtgcggtggctcacacctgtaatccgagcactttggcaggctgaggccggcagatcacgagatcaggagttcaagaccagcctggccaacatggtgaaaccatgtctctactaaaaatgcaaaaattagtggggcgtggtggtgggtgcctgtaatcccaactactcaggaggctgaggcaggagaatcgcttgaacccaggaggcggaggttgcagtgagccatgatcatgccattgcactccagcctgggtgacagagcaagactccatctcaaaaaaaaaaaaaaaaaagcaaagatggggaaaattggggacgtcgcctatcccgacccctgtgcctgacacgcagcccgtcacagggcgtgggaagcacggggcagttgcggggaccgccgtgttctcagccacccacccagggcccccagcatctctccagcgtctcctccatttgagttcaaacatgggccctttctacaatcagctttgtttgtgtggtgtttggaattgccatcctggaggccctgggtactgttgtgattcctaggctggtttcctggggctccgtgtggtgggggcctctggccaagctgctgtaacaaagaccacaaacctggtagcttgcaacggcacacagtcaccatctcacagtctgcagggcaaggtctcgctctgtcacccagacttgggtgcagtggtacagtcgtggctcactgcagcctccaccccctgggctgaagtgatcctcccacctcagcctcccagagtgccaggaccacaggtgtgagccaccaccatggctggcccaaatcaccccttatttatttatttatttatttaggagacggagtcttgctctgccacccaagctagagtgcagtggtgcaatctgggctcactgctacctccgctccccaggttcaagcaattctactgcctcagcctcccgagtagctgggattataggtgcccaccaccacgcctaactttagtatttttagtagaaatgtggtttcacatgttggccaggctggtctcaaactcctgacctcaggtgatccgcccaccttggcctcccaaagtgctggcattacaggtatgagccaccacgcccggccaaatttcccatctttataaagaaaccaggcatattggatcaggatccactgtactcccgaatgacctcgtgttaactgattacatctgcagagaccctatttccaggtaaggtcctggggttacaactgcagtctgtggatgatttgtgggggacgtggttccaccctagtgcctgccacctgccatctctctgggggtttgatgcccttggggtgcctggcacctcactctcagctgctgccaaagcccttcttgagctcgtcaaggtcaccctggattctaatcccaacccccaggcacttcttggcaccaggaacattttctgcaggtggcctgcgaaggagctgggagctgtgctcaaatgcttcctcctaacaagccttccgtcctggggactggcactgtgttgagacgggagagactccaggtccgcagagggcaccgtcctgcctggaggttcaggactgccaccattcatctccgtgaggagctggagcaggcgtcctgcctttctgtgtcctctaccctggttttgaatagaaggcatcctggctgggcagggttcttcagggagcaggtgatccggcattcagccagattcttgaaaaccccctgggccgggcacggtggctcccgcctgtcatcccaatactttgggaggctgaggcggggagatcacctgaggtcaggagttcgagaccagcctggccactgtggtgaaaccccgtctctggtaaaaatacaaaaattagccgggcatggtggtgcgtgcctgtaatctaagatactctggaggctgaggcaggagaatcgcttgaactgggaggcagaggttgcagtgagccaagatcgtgccactacactccagcctgggcgacagagcgaaactctgtctcaaaaacaaaaacaaggaaaacactccagcccccacaccagcacggggactgcagcgcccgcgagacttgggtcacggtgactcctggaggctttgcacgttaagccgccgcctgcccagggacactgtggtcaccttcccccgccggagccctgcgtacctctcctgtctgtgctttgagagaggagtttttttcccgttgcttctggaaccctgggttgtcctgcagaataggacaccctccttcattacgatagaggatgcagagccgctccctggcaggtgttcccagtcccagcaggggtttccagagacacagggtgcggagggattctccaccaggagatggttccagatgcgtaagcccgtcccctctgcaaggccctgtccccaaagagcttgggcctgtgggtcccacagctcctgcgagtgaccaccaccgtccagggccccccaagctgttcactcacgggtctgggtggaggcagacatcctgggaggaaccccaggggtgtggccgaggctgcacagaggcctctccacgcctcctggagggatgggagttagtctcggctggagtggagggtggggaacccagagtcaggagcacccagagtccaggtgggaaacgcctgaggcaggggccctgcttccacccctgctgcaggggacactcagggtcctccacctgggagtggccacgctggtggccctttgcggccctgcacattacagccctgccagctttggggagagctgacatctcaaggaagtcctttttaaaaaattttatttagccgggcgcgggggtgcacgcctgtaatcccggcactttgggaggccgaggtgggcggatcacaaggtcaggagttccagaccatcctggttaacacggtgaaaccccgtctctactaaaaatataaaaaattagctgggcgtggtggcgggcacctgtagtcccagctactcaggaggctgaggcagaatagcatgaacccggaaggtggagcttgcagtgagccgagatcgtgccactgcactccagcctgggctacagagcaagactccatctcaaaaaaaaaaaaaaaaaaaaaaaaaaattatttaatggctcacgcctgtaatcccagctctttgggaggctgaggcaggtggatcacgtggtcaggagatcaagaccatcctggccaacatggtgaaaccccatctctactacaaatacaaaattagctgggcgcggtggtgtgtccctgtagtcccagctactcgggaggctgagacatgagaatcgcttgaacttgggaggcagaggttgcaatgagccaagatcacaccactgcactccagcctgggtgacagagcaagactccaacacacacacacaaaaaatttatttaaaatgttttattaggctttccctatgttgccccggttggtcttgaactcccgggctcaagcaatcctcttgcctcagcctcccaaagccttgggattacaggtgtgagtcactatgcctggcttttgaaacatgttttaaggtattttaaaacttttaattctga[139 bp omitted]cggtgaaaccccttctctactaaaaatgcaaaaattagccaggcatggtggtgggagccagtaatcccccctacttgggaggttgaggcaggagaattgcttcaacccaggaagcagaggctgcagtgagccaagatcgcgccattacactccagcctgtgcaacagagcgagatcctctctgaaaaaaataaaatatgccgggcgcagtggctcacgactgtaatcccagcacttttgagaggccaaggcacgtggattgcctgaggtcaggagttcaagaccatcccggccaacatggtgaaacccagtctctactaaaaatacaaaaaaaattatcctgcgtggtgatgtgggcacctgtaatcctggctactcatgaggctgaggcaggagaatcacttgaacccaggaggcggaggctgcagtgagccaagatcgcaccattgcattccatcctgggcaacaagagggaaactcccatctcaataataataataataaaataagataaaaatgcaaaaatcagccggatgtgctagtgggtgcctgtaatctcagctgcttgggaggctgaggcgggacaattgcttgaacccaggaggcagaggttgcagtgagctgagattgcaccattgcactccagccagggtgacagagcaagactccatctaaaaaaaaaaaaaaaaggagctctcaagccaggaaaagacatggagaaactgtaaatgcatgtgaccacgtgaaacaagtccgtctgaaaagcctccgtgctgcaggattccagctttaggacgttctggaaaaaggctaaactacagaaacagtaaaaagatcagaggctgccaggggccggcagagggagggatgaacaggcagagcacaggatttctagggcagtgaagctattcgatctgag[138 bp omitted]atggtgaaatcccatctctactgaaaatacaaaaaaaaaattagccgggtatagtggtggtcacctgtagtcccagctacctggggggctgagggaggagaatcacttgaacccaagaggtagaggctgcagtgaccgacatcgcaccactgcactccagcctggccgac[133 bp omitted]catcatgctgaaactcgtctctactaaaaatacaaaattagctggaagtgctgtcaggcacctgtaatcccagctactcgggaggcggaggcaggagaattgcttgaactcaggaggtggaggttgcattgagccaagattgcaccactgcactccagcctgggtgccagagtgagaccccatctccaaaagaaaagaaaaaaataattattttttttctgggtgtggaggtgtgcacctgtggtcccagctactcgggaggctgaggtgggaggatcgcttgagcccagaaggtcaaggctgcagtgagctgtgatcatgccaccacactccagcctgagccacagacagagtgagaccctgtctcaaaataaataaataaaataaaaataaataaagttccctcaaatccactttgcaatggacgcatttagagtgtcatgtttgcacaaatgtggtcacctgccacagtgggcgagatgaagaccacagccaatataattacggtacagacaattgtgaaagcaaaaagagggggaaggaagcccaggtttgatttctagctggggtccaaccctgaagtgggtgaggtaaagccagatcctgtgcacacactgctatgggcgctgctgggccttcttcctggagtttttgtcggcctggagtgggagccaaggctcttggggacttaaaaaggcaagatccagctgggcatgatggctcacgcctataatcccatcactttgtgaagctgaggcagggggatcacctgaggtcaggagatcgagaccagcctggccaacatggtgaaatcccatctctactaaaaatataaatgttagccatgcatggtggcgggtgctgataatcccaggtactcgggaggctgaggcaggagaatcgcttgaacctgggagtcggaggttgcggtgagcggagatcacatcactgcactccagcctgggcgacagagtgagactccgtctcaaaaaaaaaaaaaaaaaaaaaaaaccctgcaagatctgcatttgaggtcagagtgtctgggggtagaaactgaaacagagttgggggtgaccctgagacagggtctgggttctctgtggcaggtgcagcagtcacccagtctcaggggggagatgggaggatggggaggttgtctgcgaattgcaggctgtgtctgcgtgcgagagtttcagacaaagaaggaagttattggctgagaacaatgtaagattatatgatgtaggaccttgaagaaaacaaataaaagacagttgtagattacccacgtctgggagaagaacaaggaaagagaaagaagagagaaaacaaatcctcaaatggcagcgctttttttttttttgaaatggagatgacaccttacagcctgccctgaaatgcctaacagctaaaatgaaaggctttttttttttttttgagacggattctcactctgttgcccaggctggagtgcaatggtgcgatctcagctcactgtgacctccgcctcccaggttcaagcgattctcctgcctcagcctcccaagtagctgggattacaggcatgtgccaccatgcctggctaattttttgtgtttttagtagagacggagtttctccat[136 bp omitted]gagacagagtctccttcttgttgcccaggctagagtgcaatggcaccgtcttggctcactgcaacctccgcctcctgggttcaaacaattctcctgtctcagcctcccgagtagctgggactacaggcacatgtcaccatgcctggctaatttttgtatttttggtagagacagggtttcatcacgttggccaggctggtctcgaatccctgatctcaggtgatctgcctgtctcagcctcacaaagggctgggattacaggcatgagcaatgatgcctggccctcactgctaaattaaaaaaattttttggagagacagggcctggctatgttgcccaggctggtctcaaactcctgggctcaagcgatcctcccgcctcagcctcccaagtagtttgggattacaggtgtgtgccaccatgcccagctaattttttttttttttttttttttgagagagtctcacgctgtcacccaggttgcagcccagtatcgtgatctcggctcactgaaacctccacctccctggttcaagtgattttcctgcctcagcctcccgagtagctgggactacaggcatgcaccaccgcacccagctaatttttgtattttagtagagacggggtttcaccatgttagtcagacgggtctcgaactcctgacctcagatgatctgcctgcctcagcctccc[136 bp omitted]tgggttcacgctttctccttcctcagcctccccagtagctgggactacaggtgcgcagcaccacgccctgctaattctttgtgtttttagtagagacggggtttcaccgtgttagccaggatggtctggatctcctgaccttgtgatccgcccacctcggcctcccaaagtgctgagattacaggcttgagccacagtgcccggcctcgctaatgttttaatgttttctagagacgggtctctggtcatgtggcccaagctggtgtcaaactcctggcctcaaaagctcctcccacctctgcccccgagagcactgggattacaggcatgagctactgtgcacagctctaatctcttcttttataacgacaccagtcacaatggattagagcccagacatatgacattttaccttaatctcctcttttttttttttttttgtttttgttttttgagatggagtttcgctctttttgcccaggctggagtgcaatggtgtgatctcggctcactgcaacctctgcctcccgggttcaagcgattctcctgcctcagcttcccgagtggttgggattataggcatgcaccaccacgcccagctaattttttgtatctttagtagagacgggatttcaccacg[136 bp omitted]gggaggcctcacaatcatggcagaaggtgaaagacccatctcacatggcagcaggcaagagaagggagcttgtgcagggaaacttggaggctgaggcaggtgggtcacttgaggccaggagtttgagaccagcctgtccaacatggtgaaaccctggctgtactaaaaatacaaaaaattagccaggtgtggtggcggatgcctgtaatcccagctacttgggaggctgaggcaggagaatcacttgaacccaggtggcagaggttgcagcgagccgagattgcaccaccacactgtagtctgggggacagagcgagactctgtctcaaaaataaaatataaccatcagctcttgtgagagttattcactatcaagagaacagcacgggaaagacctgttcccatgattcactcgcctcccacaaggtccctcccacaacacggaatcgtgggagctacaagatgaggtttgggccgggcgcggtggctcatgcctgtaatcccagcactttgggaggccaaggccggcagatcacgaggtcagaagatcaagaccatcctggctaacgtggtgaaaccctgtctctactaaacatacaaaaaaaaaaaaaaaaaattagccgggcgtggtggcgggcgcctgtagtcccagctactcaggaggctgaggcaggagaatggtgtgaacccgggaggcggagcttgcagtgagctgagatcccgccactgcactccagcctgggcgaaggagcgagactcggtctcaaaaaaaaaaaaaaaaaaaaggtgaggtttggatggggacacagagccagactctatcaaaggtcttaaaattcttttcacttgggtttgtttgtttcacaataacagaagtaatacaagccccaggtaagcagtcaaacaaagctaagaaacaggatggaaaagacactgatcctgtccttattccaggacggccccaggctcctcaacgcctcccacccgtgttggtagagacagggtttcaccatgttggccaggctggtctcaaactcctggcctcaagtgatccacctgcctcagcctctgaaagtgctgggattagaggtgtgagccaccatgcttggccccaaaatcgccttaatattcatcccttatggggacacagacacatactgcacatctgctgggtgccagccagggtccagcaagtcctgcctgtctctgcctcaattttcttttttctttttttttttttttgagatggaggtttgctcttgttgcccaggctggagtgcaatggcatgatctcggctcactgcaacctccacctcccaagttcaagcgatgattctcccgcctcagcctcctgagtagctgggattacaggcacccaccaccacgcccagctgatttttgtatttttagtagagacagggtttcaccatgttggccaggctggtctcgaactcctgacctcaggcgatccacccgccttggcctcccaaagtgctgggattacaggtgtgagccaccgcgcccagcctctgcctcaattttctttgagtcagtgtctcgctctggcacccaggctggtgtgcagtggcgcaatcatagctcactgcagcctcgaactcctgtattcaaatgatccttatgcctcagcctcctgagtagctgggaccacaggtgcgtgcaccaccacacctggctaattttgttatttttttgtagagatgggggtctcactatgttgcccaggctggtcttgaactcctgagctcaagggatctgcctgcttcagcctcatgagtagctggacatgcatttccatcttgctctgtgttagctgggggaggccagctcctgaaagcccttgcccttcccaaaatgctgggggacgtcctgacccccccatttgtccttcctgtgtctctctggctatctgtctgtgtcttcacctctctgggtccccaccttccacagcccctctccggtgacccccaaactgcagctgtattctcctgcagaggagttcggcggtctctttgtgggtcgtttttatctcatgccctcaggcctccctcacgtgcccctggccctaattaaggtattttcctaaacaagcccagttgcgtctcttaaaatgaattctggtgccagctggtaaaattaatttttttctcatcctctacaatgcaagaatgaatgacacacggtcgcttgtccacaggaggccggcgtcctgcggaaggacaagcgtgtagaccagtaattacgttccagtgtggaaagtgtcccacatgagtgcggcggagcgaggtagccctgaaataaggggcatccccacggtgcagctactagacatggctaaggttgatttcacactcaccctcgctggaccgtgttggatagtgtcagccaaaatatatgtctccctagaacctcagaatgtgaccttccttggaagtagagtctccacagacataattagttaagatgagattgtggcagggctcagtggctcacttctgtaatcccagcactttgggaggttgaggcgggcggatcacctgaggtcaggagtttgagaccagcctggccaacatggcgaaacctcgtctctactaaaaatacaaaaaaattagccgggcgtggtgccgcgtgcctgtagtgccagctactcaggaggctgaggcaggagaatctcttgaacctgggaggcgaaggttgcagtgagccgagatctcactacttcactccagcctgggcgagtgaagtagtgaagaggctgtctcaaaaaaaaaaaaaaaaaaaagataaggttgtattggagaagggtgtgctctaatctaatgagatgtccttataagaggaagaggcatggaccacacactttgggaggtcgaaggtggaggatcgcttgaggtcagaagctcgagaccagcctgggcaacagagcaagactgtgtctctacagaaaatttctttttcttttctttttttttttttttgagacagagtctcagtctgttgcccaggctggagtgcagtggcgtgatcttggctcaccgcaacctctgcctcccaggttcacgccattctcctgcctcagcctccccagtagctgggactaccagcgcctgccaccatgcctggctaatttttttgtatttttagtagaaacgggggtttcaccatgttagtcaggctggtctcaaactcctgacctcaggtgatccaccgcctcagcctcccaaagtgctgggattacagatgtgagccactgtgcccagccacttttcttttttcttttttttttttttgagttgaggtctcattctgctgcccaggctggagtgtagtggcaccatctcggctcgctgcaatctctgcctcctggattcaaacaattctcctgcctcagcctcccaagcagctaggattacaggcacctgccaccacgcctggctaatttttgtatttttagtagagacgaggtttcaccatgttggccaggctggtcttgaactcctgacctcgtgatccgcccaccttggcctcccaaagtgctggaattacaggcgtgagccaccgcacccggctggccttttttttttttttttttttgtagcaacagggtctccctgtatagcccatgcctgagtgcagtggagcgatatcggctcactgcagcctcgaccttctgggctcaagtcatcctggtctccccaagacaatcctgacttccgtggagcccctgggtctccagaaacaccagtgacagccctctctcttgtgttctgaatttcctatgtaaaaacctggcttgtgtgaagggggctggtaattggacatctgtaaagctccttggcagtggggccccgtcaaagctggcagtcgtagctccgtgttaacaaggtcaaggtctggtcaaggtttccagtgtggtccccttatggcctaattagggacttgaatgggttggaacactgattgagtttcagttcagaggctattttgatgttacagttcaatcactttagaaaatatagattcagttctggttcaggctggaacactaggtgtgtgtctgtgtgttttaatctttgatttagttcatggttcagtatcaaacttaatacatttttcacccatcatcagattaacaaagatgagagaaataatcacgcccggccctcgtgcagggtgttagatgggccgtggtaatgcggggctgccgccaatgtgaattggtacctttctgaaaagcaacttgacgtcatctgtcaaacgccttgaggatgtccagaccctcagacccagcaatttccgcctccagggatttatcataaggatataatcagaggtgcaccaagatttacataggagagttgctttctgcggccttatttaaatcatggaaaaatcaggaatcgctgaaatgtctcacaatagcggtctggttaataaaaatacgatagcgaccgttgtcttacaacgccttgagtagcagagggaattgtgtatgatacatttcccgcagaaggggaaacgttttaattaaagccataactgacgtggagccggaagaagcctgtgaaaggacgttcttgcatcgacctgccaggcctttgtgctgccttagaagcagccgctttattgcaactgtgaatctctatggtttaggagagaaattcattctttaaacaaaatttgagtgagcgctcggtgacacggactgggcttacaatggtgaagaaaacaggactcagggaactcacagacgaatggagaagacatttaataaaataagacctaacatttcaccactggcacaagtactttaaaagcattaatttatttaataccagagccagaggccaggcacggtggctcacgcctgtcatcctagcgtttttgggaggtcgaggtgggtggattatgaggtcaggagttcgagaccagcctggccaacatggtgaaaccgtctctactaaaaatacaaaaagtaggcgggtgtggtggcgtgtgcctgtaatcccagctactggggaggctgaggcaggagaatggcttgaacctgggaggtataggttgcagcgagccgagattgcaccagtgcactccagcctgggcaacaagagcaagactctgtctctaaaacaaattaaaaaaatatacctcatttgagctcataggagctttgaactcctgggctcaaggaatcctcccatcttggcctcccaaagtgttgggattacaggcgtgagctgttgccacgctgtgttttgttttgttttgtttttgagacagggtcttgctttgtcatgtggagtgcagtggtgcaatcacggttcactgcagcctcgacctcccagactcacgcaatcctcctgcctcagcctcctgggtagctgggactacaggtgtgcatcaccatgcctggctaattcttttttgtttttgtacaggcagggtctcactatgttgcccaggcctgtctccaactcctgggctcatgtgatcctcccatctcagcctcccaaagcacctcccaaagcacaggcgggagccaccgcactgggccccactcctcctgaggcagaggcttggatctggcacagcaccccttctgctgtattccctgggctgaagcaggtcacacgccagcccaggattttttcttttttctttttgagacagagtcagtcttgctctgtcacccacattggagtacactgacgcgatctcagctcactgcaacctccgcctcctgggttcaagagattttcttgcctcagcctcccaaatagctgggattacaggtgcacactaccacgctcagccaatttttgtatttttagtagcgatgggggtttctctatattggccaggctggtctcgaactcctgacctcaggcgatatgtctgccttgacctcccaaagtgctgggattacaggcctgagccaccgccagctcagatttaacgtgagaggatatcagagacatagttcttgccaaccacccacagaccaccacccccattttatagacaaactgagacggctgagcaaggtggatcctacctgtgatcccagcactttggggagccgaggtgggaggatcacttgagcccaaaaggtcgaaaccagcctggccagcatagcaagaccctctctctacaaaaaataaaaatcttagccagccatggtggtgcgcactgtggtcccagctactccggaggctaaggtggaaggatcatttgagcctgggaggttgaggctgcagtgagctatgactgggccgctgcactccagcctgggccacagagccaaacttcgactcaaaaatgtaaataaaaataaaaaacaagtgaaaggtgaacattctcaacttgataaaggaaaaaaaatcagtcgctgaggttgctgggatcgaccgaagacacaaaccttctattcccgcaaatgtgagaaggaaaaagaagttagagccggctttgctgtcgccccttccccttgaagagtcggggccagtgcgtgacgaatgctgctgtaagtcttttaattttttccttttttgagacgaagtcccactctgttgcccaggctggagtgcagtggcgcgatctccccttactgcaagttccgcctcccgggttcaagcgattctcctgcctcagcctcctgaatagttgggattacaggcatcgccaccacgcccggctaatttttctatttgtagtaaagacggggtttcaccatgttggcaatgctggtctcgatctcctgacctcatgtgatctgcccgcctcggcctcctgctgggattacaggagtgagcctgtatcttttttatagagatggggtctcgccatgttgcccaggctggtctccaatccttgggcttaaaggatctgccaattcggcctcctttgcttttaaagaactgtgggggctggcgaggtggctcaggcctgtaatcccaatactttgggaggccgaggcaggccgatcacctgaggtcaggagcttgagagcagcctgatcaacatttagtattctctactaaaaatacaaaaattagccgggtggggtggcgcgcacctgtaatcccagcaggaggaggctgcagtgagctgagctcgcgccactgcactccagcctgggtgacagagcgagactccgtctgaaaaaaaatcaaaaaccgctcagggaaaggcctgacactgatggagcgaccgctccggggctcccgccacccgcggctgtttccggtgccccccggggtcttgggaccctcccaaggtgggtcctgctctagttcagaagcttatgacgcctttgcggggatgcctggctttgggatcggttgggatctgctggaattgggtccgtggcgcgcagctcccgggctgggaggtgccgtaggacctggaagattctcgaaagttctggaaggttctctcagggatcgccgcgggcgggggagcctgttttcccaccgagacccgcgagggcggtgtccggggtctgactgcaggacaaagggccgggagcgcgggagggcggcgcccgggagcggccacacatgccccgccaaccggtctcctcaggcagcactcccgggaaaaaggggtagacgcgcggcggaaggggcggggccggcgcgcggccgtggacgccggagagggcgaggccggcgctccttgggagcgcgcgcgtcccattgggcagcgggcggaagggggcggagcttggcgccgccgcgaggcaagccccgcccccggccccgcggggagcggcggcggcggcggcggcggcggtggcggaggcggtgagcgcgggcggcgcggacggcagcggttggcgggcgggtcctccgctgttgcggccgctgcggcctccttgcccgggcttggggcgccgcgctggggaaagccgggggcccggtgagcccgcgggatgcgtcccctcggttccgccgggcggggctgaggcgaggaggccgggcctggggggagggggggccccggcctagagactcctccgggagcgcccggtccctaccgccgtgggtcccccactctgcccggacccccttttccgcccctggcgccgtgggcccctcactttgcctggactccttttcccgtccctgccgcccggaccccatctcttgcttggacccgctcccccatccttgctgcctggacccctatctccttccctggatccccctcacgtctgccgtgaaccccatctcttgcctggacccccatctgcttccctggattccccacccccaaccgtgaaatcccccatccctgccacctggaccctccgctccacctcctccgtgagccctcgttcttgctccctgagcccccccgcttctgctgtgacccccttctctgttgcctgaatcccccgttcctgcaagccgcaacccttcctccgccatgaaatcttgtccctgctgcctggacccctacttctgctgctgctgtgatcccctctcttgctggaaacgccacccctacctctgctgggaacctcctcttccctgctgcggggacgcccccctccgttgttgctaaattccacccccacccccaaacctccttttcatttctgtcaacagccaagccagtccttcccattgatgctgtgaacggtctgcagctgtccccgttctttcagggacatggcagccaaaagagcagtcgtttttccgctcttatttttgtgtgtgtgctgtggtcaactgttaactccccaaattggggagggttgtgagctttgattgtgtaaaatgcctctcctgccgaggtcggaggcaggtcttccgcacggagatgatttattcaggagccttttaaaactgatctagatagaacctttgggagggactgtgctgtattttatttatgaaaaaatgcaggcgcctccctggataccgagccccgtcgtttctgtttgtcagtctgctttttggcattgagcatctcaatgcaagattgtggaattaaaccatctacttgaggctaagtcgagctaacctttgcccctgagggctgtgtctgcgttaacatcgccagcaaacagttgtataaaccaccgtgcaaatttcgttccaggacacattggcgtgagacctgggagtacgttgtgccaaatcattgccacttgccacatgagtgtaaatgatggcggatgccaagtatgtcctctgccgatgggaaaagcgattatggcctgcgaaggtgacagccattattctgtaacttcaggacttagaaatgactttcgggtgacaagtaaaatcttgatcaggagatacctaggatttgcttcagtgaaataattgagccagaacacggttggcactgattctcgttccccatttaatggggttttggtctagtgcttccaaggttacacttccagaaatgtcttttttttttcacactaaaaaaaaaaaaagaatcagctgtaaaaaggcatgtaaggctgtaactcaaggaaagatctggcaagcagccctgtgatagtaaattatggtcgtgttcagggaatgctttccagcaattcagtagacagtgctcagctgcaatgcaaaagcccaggtccttgtctttgtctgccactggcctctcatgcctcagtttccccatctgtgaaacaatggggattggaccaaatatctgaaatcccatggttataggccttcaggattacctgctgcatttgtgctaaagtttgccactgtttctcactgtcagctgttgtaataacaaggattttcttttgttttaaatgtaggttttggcccgaaccgcgacttcaacaaaaaataagagaagaaaggaatattttctagctgtgcaaatcctctctctagaggaaaagttaagtgttgtgttgttttaatactgttttttcccgtgtagatttctgatacttcaatcccctactcccccaaaacagttgaagcccagcccactcttaatgggcttattcaccatttgtgtaattcattaatgctcataataacctcatgagaaagcaactagtttgattttatgtcagtttggaagctgaagatccaaacgaggcattctgtgagatctatggagagattggtacaaacactgaatacatgtaaattatactcagggtagaccctatttgtggttaaaatagggatatttccttttttttttttttttttgactgtttcttaatcagtgccatgccaggaaaatagggatgtttccttcccagagatctgtgtgtcttttttcagaaacgtctgtgacaggcccatcaattttgaaatatttggtttttgagcctgtcactctaaaccagcgtttaacgttcaaaaggcaaataactgatgaccaggcggcacattgttctgctccgtgagtgtctggcactgggaaaggtgtagattgtctagaatgacagcaattccgacgccccagtcagtcctgcgtgattgtggcgagggcgcgtctggcaccgggaaggtgtagatcatctagaatgacggcgattccgacgccccggtcagtcctgcgtgattggcgagggtgcatctgtcgtgagaattcccagttctgaagagagcaaggagactgatcccgcgtagtccaaggcattggctcccctgttgctcttccttgtggagctccccctgccccactccctcctgcctgcatcttcagagctgcctctgaagctcgcttggtccctagctcacactttccctgcggctgggaaggtaattgaatactcgagtttaaaaggaaagcacatccttttaaaccaaaacacacctgctgggctgtaaacagcttttagtgacattaccatctactctgaaaatctaacaaaggagtgatttgtgcagttgaaagtaggatttgcttcataaaagtcacaatttgaattcatttttgcttttaaatccagccaaccttttctgtcttaaaaggaaaaaaaaaaaaaaaccattcaccagggttcttgctgcctgtaacctcaggcagatgaattcctagttggctgtgacttttggtttaagtggaaggttgaggaggaaaatgaaaataattcttttgttatctaaaggaaaacatgtttgaaaatgtcttggcggcgttggctggtggtgtgtaacgtcgattttgtctctgcagaattaaggtgaaaagcactgaagttgagatcctagagaagtctcaaattgaagccattgcttcctcgttaggtaagagcgtatttttaagtggccactaggttttcataaaataagaggtcatttgggagaatgtgaaggctcagctttctgggtaaaaattcaccctgttcaccatgtttttcttcatacaagggaacgcgaatcccctgagctgaaggagaaggaaaaatggatccgctttcttaaacctttccagaatttgcccctagaaccactcctattcttgacgcccagaatggtcagtggtgagcatcaaggtcatctcgtacccccgtggcctccagtacacaagacgaggaaggactttgctgccataaggggggaggtcctcctttttcctttcctcttcctatagtaagatttgctgtggtactgtcgctgcctggccagtctggtctcagcccaaggtttgagaagcagttggttgtgtgtttaaaattccagagcagagcccaagggagagaacgggtggcctggcactggggttggtggcacccattgtttgaggcactgtcatggggggcacgaggcaggtcggaagtggagctctcggcttcccatccatccgggtgcgctttctcccaggccttcagtttagcacccacctcctttgcacactgtgggtgagaaaagctttgcctgagtccagccggggactggtcatgcacatacatgacaagtgaggagcactggtgactgcctgccccctagccacagttgtgcaaacccaaacctgccagccttccttctcaaagtggaactgtttatcccatttgcaaataattgtttctcttgtgaaaagatggaccggaattccttccaatgatgtttataaaatcaggtctattttcctgtgtcttccgaaaaacagctcttgtttaaagcaggatccatctctgcataacttaggccgggctgaccatcatcttggatggcgtcgtccttgttggcgcagattgtgttggggggctggttgtttgtgggcgcctttaatattcaaaggggagaatactgttctgattgaggcattatgcccgctgagttgtgatattacatccatcatcttgttcaaataaatagcgccgtatctatatgtcggaatgaataaataaaagtgctgcagcagggaggttgggctggaaaccagaggcccacgatgctctttgctggctttgaaatgcccttgcaaagaagtattgaaaatttaccagcccacaatgagtcttttaaatctccttttccttgctaccaccaacccctgcaccaaccaagaatacgttgccagcagagttctttatttagttggcattggtttttattgaccctgattgaatttgaaattgtaaggctgagagaggatttgcaaaacatttgaatacattttgctcacggtattgttttgtaacttggaggaatttatctttttagccaatcaggttaaggtcaataaatttggtttttaaaaaaatgaagcctcgaatcccggaatgaatagctgtcgttctgtagcctcgtctcctttttgggaaaatgtaggtgagaaatgttagtcctccccttcagtgatttaggtatgaaactagccgtcagaatgagacaagcgagcttctaaagcgatgccgtgaccgcagtgcctgtgcagtgaacgtaaccggcattgtgtatgttcggtccttgcagcctcacagaatgaggttcctgcggcacccctggaagaactggcctacagacggtcgcttcgcgtggctctggacgttctgagcgagggctcgatttggagtcaagaaagctctgcagggacaggtagagctgaccggtctctgcgagggaagcccatggagcatgtctcctcgccctgtgattcgaactcctcatctcttccccgcggagacgtgttgggcagttccagacctcacaggaggaggccatgtgtgcaacaaagcctgtcaagttcgttcacttgtgaaaaggaccccgagtgcaaagtggaccacaagaaggggctcaggaaaagtgaaaacccaagaggcccgttggtcctcccagctggaggtggtgcccaagatgagagtgggtccagaatccaccacaaaaattggactcttgcaagtaagaggggaggaaactcagcgcagaaggctagcttgtgcctgaatggatcttccctttcagaggacgacacggagagagacatggggagcaaaggaggcagctgggcagccccgtccttgccctccggggtcagggaggacgatccctgtgccaacgctgagggacacgaccccggtctgccgttgggcagcctcactgcgcccccagcccctgagccctcggcctgctcagagcctggagaatgccctgcgaaaaagaggccgcgcctggatggcagccaaaggccgcctgccgtgcagctggagcccatggcagcaggggccgcaccatcccccgggccggggccagggcccagagagtctgtgaccccgcgcagcaccgccaggctgggcccgcctccctcccacgcctctgcggatgcaaccagatgtcttccttgcccggattcccagaagctggagaaaggtaaaagtttctcgtggaggaggagagcgcagagggtggagtcctgctcctccgcagccagactgggagccaggcacgtgggtgtttttgaccagattttaatgagatcgttgccaaaatagacttagagcagagacttcctcattcctttttgtctgtctccccactgggctataattgcttcaacttctaaatatttgtcttcttatttttgtttagaagggaagggagttgagtgagtggggagcccgtagaggggcggcgggccacgattgtctgcggcgcggctgggagcattgtggctgtgctgaggccgcagctgcggctgcaccccgaggattaactcttttaacggaagcagtaacgcattcctattaaattgggcagcaatctcaaaagtgattcactcactcaaaagactgactttttaaagaattcctgtgcagatatatttttgtgtggttgcaggcaagcactgtgacttttttccttttaacactgtagcatcctttattttttaaatgctagttcagaaatcttaattaccacatgatcaaatgtctggaaatctacttgctacaaacttaccgcgcagatatttcagtctgtactctgaacttctttcctgaggtcatcatctccttagcacgttggaagcggcagggaactgaggttgccacgctctgaagacaaagtgaccgcacccctaccctgttccatagtcagctcccgtcccggccccctccctgcgtatccgcacctctgtcctgttccatagtcagctcccgtcctggccccctccctgcgtatccgcacccctaccctgttctatagtcagctcctgtcctggccccctccctgcatatccactgattgcttcagatgtgaagggacagccaggccgggacaaaagggattcccacccagggtgcgcgcagcttctgtggccgaggtggctgctgcttacggcccgccttcccttcaccgcaggcctctctccctccctccttccctccttccctccttccctcttgcgtttttctttaaaatgtagtttattagaagcgcactctgtttgaatttggcagtgtggagttgtgtatagcatggaaccttttctttatgcatcgatggtcatgtgtcatgaaatgttttcttgggatgagtcatcaagacaatgcaatgaccatgaaagtctaatatcacattattggcagagtgccagtcttccgaagagtccatggggtctaattccatgcgttctatcctggaggaagacgaggaagacgaggagccaccaagagtccttttataccacggtaagaaatgatcagggggcgccggcagtcctaacggtgcgctcagaggcagcggcggcggggctccgagaccgggccccacattctccatgaaaggtctcctgcgagttcatttctctcccactgaaccgagacctggaagggaccttcagaagtgtcacgttttcagtcctctatcttaagaataacctacacaaagggacgagagactcctgggaagagacggcccagccctccctgttagagcattactcctgtcacttacctcaagcccttgtcctcctgtcccctcgcggggagtgagggatggcccagtgagccgaggggctgcgtcgccattgctcgggtgtggccacgtactgtctcgcggcttccgttggtgatggcgtttggggggctgtccagggaggcagggccttcagcccaagagtgaactgctcccgcgcccctcctgtaagtagctgcttgcactagaggaaaacctgcctttaggtgcccctgagcatctacgtggaagggactagaaatgagagacccaaagatctgagccagccgcgaacagaaagtcggcttcgcaaaccaagtcacaagaaccagccccacttgagactcgcccgtgaaccattcctcttaaccaagtcttgtttttcttttctttaaccttctagtttcagaataattatagattcacaggatgttgcaaaaatagtaaagggaggtgagggggcttctcacccgggcttccccactggcagcatccgtaaggcgcaggatgtccccggccaggaagctggtgcgtgtgcagcctcgggagcgccattccacgcacacttgcgtgccggtggccttgttatgtcgttctttttttgtctacactgtttgagtgcttttccatcattgaaagggcttcattacagtctcacattttcccttttttttgcctaatgctaatggtcagactttttaacagttttccacatgctcttctgatccttttcctctggggtgagcagtcaccactcaccaaaccctgccccacccattgggcacctgtctggatggtcccaggaccgcaggtgctgtggggcacccattggggacttccaggaaatcatttctgcaggatccgttcgcacacacgaagagcacagtgccctcgggaagggccctttccgaccacgctgccccactggggttgggtcaccgggacatacagaggctggtgctgcctggcttctcctgcctgcggtgggagctgggttttgctcccgtttggttttgttttctacctgtcaggctgggcgtctttctgagggttccctgaccggcctctgaattgattgtttgtccacgtgggcctggaagtttctcttaaagactaaatgcccctcactggggaaacgacgctgtgccatgttcacagcagacactcaccccagtgggcctccctttttctctggtcacgttggttacttcataggcctttaggttttgatctgtgtttatggaccacggcacttccttccttccacagtgcggtcagacacaggctttgtgtgtctaacgacagactgtttccagtagtttttctaatactttagttttaaaattttaaataattcacttgttttttggcattgaaaatatttcattcataaatagtttctagttatgatttaaataattttcccatttttgactgtagtttcccagaatcctctttagaatctcagtccttgtgtttgggtcttctccgcgtgccattacctcacctctgttttgtgccacacactctttaaaagtgtcttcccgcggggtttagagttaggaaagtcgcgcacacataggacagagccccagccgcccctcgtggcacccctcccatcccaagggtgcgtttgtcgcagctgggaacccagtgcagcaccccactcagctgctggtttcactgtctcatcattggtggttagactcaagtagtgtggggtatgtgaatctgcctttcagattctcctgatcttttaagcgaatgacacaaagtcaggttttaacaatatcgtgctaactgtgttttctcaggctgttacacctggtgcttgatatggatttgacttgtctattcttttttttttgtttttcttttttctttaattctagaaccacgttcgtttgaagtaggaatgctagtctggcataaacataaaaaataccccttctggccagcagtggtaagaacagcttcctccgtcttctcagatgtagttacttaaatttcatgaatttttattccatccatctttagttcttgataatttgatcaggataaatgttttcattgttttgtttttcctgggaaaagttggtgggtttttagaaaagacttcaggagatgcctgtacctaaattaaggcacaatggtgttaagttgataggccacattttcaccaagcaggcttagaaagacctactcgaaaaaaatatttgcggccgggtgcagtggttcatgcctgtaatcccagcactttgggaggccgaagtgggtggatcacctgaggtcgggagttcgagaccagcctggccaacatggtgaaaccctgactctactaaaaatacaaaaaattagccgggcgtggtggcgtgcgcctgtaatcccagctactcgggaggctgaggcaggagaatggcgtgaacccgagaggtagaggttgcagtgagccaagactgtgccattgtactccagcctgggtgacagagtgagactccgtctccgggggaaagaaaaaggaaaaaaaagaattgtgatttgctcattttaaatattgtgcatttcaccccatgagagctcattaatttggattttgtggtggggttggttgcatgtgtacaaacaggaattcgaaatcctgtccaagttcccggtgtgggtgatgagttcaagccggggcagattctctgcttctgtctctgcaggcctggaagttgcaggtcattggtttgggtgctgtcctggccttcgcctctccttcatatcttacccctttttccctttatcctcctaagacacaaacgccaaaaggcgttggccctgcagtaatccagagacgcctttgttgctctaatgactgacctcactcgagtcacccaggctccttgcatgtgactgattgtggttccgggaaaccggggattgaatctgtgtggtgttcgctggggaggttcaacacgtttatggcctagctgggctccttgtgtcgcctactggccggcggagatggaggccgggcttctggaccctccgccctcccttggcactggtttcctctcccgcaccttggtagtctttcccttgttttcatcagtttctggggtccctgctgggttaacaggtcactgatgtgacaggttcctggggcataagagcaggcagcctccctgagagcgcagggcggaagggccatcggaggcgctggtcgccactgctcctcactgccttctcacggtggccccgggaggccaggactggggaggctgtggggaggtggcagcgccctgtagtccctgcccctccccgtgtggcctgggcttgttcccgagcctttctgcacttcctccactcacccagagcattaggaggacaaacctgccctgctgagccgctggagaatctcaggacgcttatttaaagaggcagctggcagcggtagctgtggttctttttattcaaaaacccaaacaaaactggctgattccgctcagatgggaaaacgttcaagtgatgcgtgtggcagagcatggggccgtttctcagcgcctccttgcgggagacttcgctggggtcacccccagagctggggtcagcgcctgttagatgtatcatgtgatgtcacaaaaaaatatttaaaatccacgatctcttttgttttgacgttttattttcttggatttgtgaacaggtcaaaagcgtcaggcagagagataagaaagcaagtgtgctatacatcgaaggacacatgaacccgaaaatgaaagggtaacccgctgttcttggtttctgtgaatgggcctgaggggccaggccggccgctctcagagtcagagcgggcgtggggatggagggacagaggggaggccccggcaggagtccaggcccgggcagggctagtgaggtctcactggaggtgtgcccttcttgtggcctctcactccctgggatgggtgagtcagacagaggctgggtgtgaagggtctggtcaaacaccccagttttcacaacttgatttgctggctttgaaaggcagcccaaccagacactcactggggccctgtttcccacaaaccagcaaaatgtccacgcaggtgtgcagacagcatccctgcgtccacctgagtttgcccctgggttacctggtcgttccttagtcatgggatgaaagcacacgtggatggatcagccggctgaaagcagcctttagaaccatcgcattgcatatccccaagtcgaacgcgcagaaccggtgtcatctggtacttctgtgctgcccccgaggggtgggaggtgtggagtggagacccaggccccgaggtcggcctgtcctggcggggcccagtcagtgttgctgaagtcactggacccaccatggtgcattgggagcttcttggcagctggggaaacggtcaccttccataaataagctggggctggtggggcctccagcggcctccactgatcttaatcagagacagggaaaggtttttagcttattagaggaagttcattcatgttaacttttccctctctctgcttcaagtttcacagtgtctcttaaaagtttaaagcactttgattgtaaagagaaacagacgcttctggtaggtggatgatgttttgtgcttgctttaaatggtttactttgtgattagtaaatatgtcctctgtgtgtagctcttgaaatccatggctgcggtgtacgcgtgtgaatgattgtgggaagtagcagagccaggctgcgctctggccgttagagttagatcgtgggctcagtcactgcgctgaattctcacaactgtcctgggaagttgcggccccatttccccgctttacgggtaaggaagctggggctccggcgaggacagtttacccagggccaccaggcaaggctacagcagagagcctctgcgcaaggccaccgccttccctggccgactgtctcagtccaccccatgtcacggtggcctcggtagccagccccttgcggccgggggcgtccctagctcagcgtcgggagccctgtgggcgctcaagtgctgcagtgagcctggccgataccacgtggcagacgtcttgctgcagagtggcttcctgctccctggatctgcagccagctttcatcatgtgctgtcgatgaactgcaagggatttgtctaactcagaaatgtctatttcccctctggaaatactcattttgttgtggcgacttccagcaccaacacgtcaactcagtgcagttatttttactcctctggaaaaaaagaaaaagtggttgtgtcttttccactctcagggatctgagttactttcttttgttttttttgagacggagtctcactctgttgcccaggctggagtgcagcggtgcgatctcagctcactgcaacctccacctcctgggttcatgcgattctgctgcctc[131 bp omitted]tcagcctctcaaagtgctgggattacaggtgtgagccactgcgcccggctggaactgagttactttctaaaaatggatgaaggtgtggggtgaggagaagagcaggaagttccgtgccttaaacgcagaagggctgccgtttatatcaaaaaccctgggttctgagagcacagggtgcccgcttcttcttcctaagagtgcgctcacatctgcttgtgagtcaggtatgtggtggtcccgaagcccacttgattcagtggtagtcaccgtggcttctgagggatgatattggggaagccgtgctttaggaaagtgcgggggctgctgggcaggcagagagcggcgtccacccggccctgggatgtgcttatggggtgcccccgtacccctagtggccctcggctccagagtcttccctgggtcattgtgtgatggtcgtggctttatggcatctttgggacggctgtgtccttttctggggacccaccctgctgccagcccaggtgctgttagagcagcccaggtgctggcctagcctggctgcagacgatagctcccaacaaaaacggctgttagagcagcttatttccaggacttgatgtcctgtcatgtggcacagtggccacaggggaggtgtttgcaccgtcgatgcgttcagaccagcccaagccttcgggtccccggtgcccacctgcgttcagaccagcccaagccatcgggtccccggtgcccacctgcgttcagaccagcccaagccatcgggtccccggtgcccacctgcgttcagatcagcccaagccatcgggtccccggtgcccacctgcgttcagatcagcccaagccatcgggtccccggtgcccaccatttgagcagctcagggcccagacctgtgcctggtgcgtttcccatttaccagagggtccctgtgcgaggcgtctgccagagccccctttgtcagggagggtcagaggtgcgggctggagcgtgagcagcctggacacctggctggtccctgggctctgcgtggcttctgaacccagggtgcttggcactgcctcccactgacgcctgctgcccggatctcattgtagaatcaagccagggaggacttcaaccaggacatcggctggtgtgtctccctcatcaccgactacagggtccggttaggtacgtggggtgctggggaggggtggagctgggcagcaggcgtccagcctctgaagaccccttggacgggctgggccggagctgcctggaggcggggcatatttccgtgggcctggggcattccctgtgggtgggctggggttctggcctggcctgattatttcctaaacagagacgccgggccagcccctggaacacacttcctgggactcctcttaggtctacacagtgctctctcccctccaccccctgcaggctgcgggtcttttgctggctctttcctggaatattacgcggctgatataagtaagtctacaggcacatcttggaaaatgtggtttgccttttagccctttagaaaaacaatcttctatgtctgaagctgtggaaggggacgttggggtcaaggcactgtccgcagccacacagcattgttcaacctctatgaggttttgatgtgaccctgaggctccctgggacctggggctgctggtgtccactggcacagcatcccgagcctgccctggggccctcatcccatgggccacatccagcgtgtccctgctgtggctggtggctgcacacatcagatgttgtgaagaatgtaggccaggtgcggaggctcacacctgtaatcccagcactttgggaggctgaagcaagaggattgcttgaggccaggagttcaagactagcttgatcaacagagcaagaccccatctctacagaaaaatagaaaaaaatgagctgggcgtgtggcttgcgtgcctgcagccccagctactcgggaggcagaggtgggagaatggcttgagcccgagagttcaaggctgtggtgacctatgtgattgcaccgctgcactccagcctgggtgacagagcaagacctggtctcaaaaagagaacgtgtcacgaacaccgggatgtttggccaccacttcactgtcgatccagcattttcctttatcgacagtagtggagttttccatgcctcctggttggtggaggagtggacgtggctgaattgattctgcttgggcagtgctgcacgggcaggcgcttttctctgctataagggttaaacctggctgcagggcccagtgaggggggaaaggccgggggtcccagcagaggaagtgtctttaggagcgtgaatgctccactcccgtgctaacacggagctcgatcgctagggtctgcccccatccctgccatgtcgcagcctcccatcggccctgacccacagccacccgaggaaggcagcccacgcgctggtcccacgacaggtgcttcttttgcaggctatcctgtccgaaaatccatccagcaggacgtcttggggaccaagcttcctcaactgagcaaggggagccccgaggagcccgtggtggggtgccccctggggcagaggcagccctgccggaaaatgctccccgaccgctcgcgggccgcccgggaccgggccaaccagaagctggtggagtacattgtgaaggccaagggcgcggagagccacctgcgggccatcctaaagagcaggaagccatctcgctggctgcagaccttcctgagctccagccagtacgtgacctgtgtggagacctacctggaggatgaggggcagctggacctggtggtgaagtacctgcagggcgtctaccaggaggtgggggccaaggtgctccagcgcaccaacggcgaccggatccggttcattctggacgtgcttctgcccgaggtgagccgcggaccggcgtgtcacgtgggcagggaggggcctgcgctgggattttgcaactccgcacgaggaggctgccacggtcctcgcccctgctccctggccgttcggcggccaacggagcgtggaggcctcctgtgtttacatcctgtcagtgctgggaaatgcgagtgcgtgcgcttgaccctgtgcggagacggagccgcttacttgacccctgtgcagagatggagctgcttagaagctgtcagcaccagggggtgcgaactccctccctactgcgggcgcacagatgcttcccagcctcggtgggtcagtcctgggaaacccactgcgagttggaaattcccaagtcagaatcgcatttagtacccagataaacccactgtaagttgaaaaactgtaagtggataatgcgcctcatactctgataaacccgtggtaagttaaacacacaaattagactgtctgtgatttcgaacttcagctgcggatttggggcttggtgaggagcaaatacagatgattttgaagtttgtatctgaaatttcagagaggacattgctgggcatatgtgtacatctgtgggaaaaaaacatactcaaaactatttaactttataactatgggaattttcaaatagacccaaaaagaaaatagcataatgaactctaatgtgcccataacctgcctggaattattttttggagcataaaaaccctcaagcttttttttttttttttttttgagttggagtctcgctctgtcacccaggttggagtgcagtggcgcaatctcggctcactgcaagctctgcctcccaggttcacgccattctcttgt[222 bp omitted]tctaaaaggagggtgattctgccccctgggggacactggcagtgtctggggacatctgtgcttgtcacagctaagggtgcttctggcatggagtgggttggggcagggacgctgctcagcaccctgcagcgcctaggacagccccacctcagagaacagtctggccccgacgtccacagggccgagtgggagagactctgctctgaaccgaatggactctgttaaaaatgtgtttaccataatcacaaaagtaaaaaatagggatgatttcttaatgtcaggtatgtattgtgtattcaggatactcttttttttttataacaataaacttaaggccgggtgtggtggctcgcatcggtaattccagcactttgggaggccgaggcaggtggatcatgaggccaggagcttgagaccagcctggccaacatggtgaaaccccgtttctactaaaaatacaaaaattagctgggcgtggtggcgcgtacctataatcccagctactcgggaggctgaggcaggagaatcacctgaacccgggaggcagaggttgcagtgagctgagattatgccattgcgctccagcctgggcgacagggcgagactctgtaccagaaaaaaccgccaccaaaaaaaaaacttaaaatttttgagaaatgctcttgtgggtttgggtcttgccttttcttctctgcttttagtgatctgagctattgtgtctagtccgaaagatagtactgatttaattaagaaacatcattacaagcagggattcatggactaggtttgcaccttctgaaccatgagctagaccatgtctggaggctggaacctggtgacccaggctccctgcggccttcttaaccgcaggccacttggggccagttgggcagtgcctgctgctattgagccccgtgccctctcacaggccatcatctgtgcgatctctgcggtggacgaggtggactacaagacggctgaggagaagtacatcaaggggccttcgctgagctaccggtaggccgctcccggcgctatctccagccacttgcgtctctgccttgcagtttctatttccacacccacaggcagtttgactccaggctgccgcagcccctctccctcatgaggtggcccaggtgctgggtggtgagctgatcacatacgctgaactcaccctgtgggtcactcctgccccccaggaaggctgtgcccgggtctcccagctggtcgctgtgggcagcacggggccacgggcacgtgcctgggccgtgtctgttcttaatctctttttgcaggggctgatgtttgctttttgcactttcctcccctctttccacagccccatggctgtgtgagaaatacagcaagattaagcagcagcacggcccggtgctttccagcagccagaagaatgctgtgatcaagatgtttctctcacatccgtgtgcttagctgcccttggatgtttggcccccagagcgcctaatcctgtctctgggcatgcggccaggccttgctgggagccaggcggggcccacggggcagtgacaggctgaagactcaactagagtcaaggacagggtctccggccagggtggcttgcgcagccaccgacgtctcccgggcccacagtcacaggagactcctggtgaagacactgaactccctcaccagccccatgtcctccctgggcagggcaggaggggcccctggagaggccagggaggaggtgtggggcctcggtggcattggcaggccacccccgcagagctgcacaaaggtggaatttggccttgtttagggagtgttggcccagctggcttaccaaaacaggaaaggcctttggatacagaaactgggtgttttcctgctggatcttcatggttcccccgtcatgcttgccgtaagaataagtgaggtccggggagggggtaaggtcggagccaggacacctggacccagcctgctggtttgtcctctccctccgtctcagaagcctcttcaccgctccacgcccatctgtggaaatctttcatcctgatttttttttttgagtctgggttgccgacatcaaaacccgttaggagttcatcacagcttccagttgccatgaaagcctcccgtgacctgtgagaatggtgctggtgctgatggagaagttacttgggctgagcacacaggccgtgatttcatcacgccggggacatgctcaaaataacaagccagtgagcagcatcgcacttgatctttggcctcagtggagccttgggtcacacactgggcgtcctgggacccagtctccccgccgcacggcgtttcccaggccctcttgttcttttagagttgcaccatgagcctctctgcactcttcccaaggctgtcctcctcaggtctgcctttctctggtgctgcggccggtgtgctctcccctatttccaggtctgctggggcgcacatcagagccagcagccgttgttgatctcttttgatccagggcagccctattgctgagaggggttgctagctaagcaattgttataattttcctttacagggaggtcacttagtaaggacaatttggcatctcatactctttcgtaaaaaattatttttagtcagtcacagtggctcatgcctgtaatcccagcactttgagaggctaaggtgggaggatcctctgagcccaggagtttgaggctgtagtgagccatcattatgccactgcaccctagtctgggtgacagagcaacaccctgtctctaaaaataaatattattttaaaacattgttaaggcctggtgcggttgctcacgcccataatcccagcactttgggaggccgaggcaggtggatcacgaggtcaggagttcgagaccatcctggccaccatggtgaaaccccatctctactttaaaaaaaaaaaaaaaccaagcatggtggcacgcgcctatagtcagtcccagctactcagcaggctgaggcaggggaatcgcttgaacccgggaggtggaggttgcagtgagctgagattgtgctactgcattccagcctggtgacagagcgagactccgtttcaaaaaaaaaaaaaaatattacacatcctgtaaaagttaccatcctaaccttcttaagtgtatggttcgatggcggtgagcactttcacagtgctatgcagccggtactgctgctcatctccgaacttcatctttccaaactacagctctgtccccatcaaacaactgccctctcatatatatataatatatattatatatataaaatatatatagccatatatatttatatataatgtatattatataaaatttatatattatataaaatatataaattttatatataatatataaaatcatataatttatatattttatatataaaatatatattatatataaaatatattatatataaaatgtataattttatatattataatatatacaattatataacaattttatatattatataatatataattgtatatattatatataaaatgtacaattttataatatataaaacaatttaatatataatatatataaagtatgtatactttatattatatataaaatatataattttatatatcatatgtatatgtagacatacacacacacacatatgtatttatttatttttttttttttgagacagagtcttgctctgtcacccaggctggagtgcagtggcacagtctcggcccactgcaacccccccaccgtgccttggttcaagcgattcttctgactcagcctcccgagtggctaggattgcaggtgcccactaccacgcctggctaatttttgttatttttagtagagacagcattt[140 bp omitted]acagaatttagctctgtcgcccaggctggagtacaatggcatgatcttggctcactgcaagcaccacctcccggtttcaagcgattctcctacctcagcctcctaagtagctgggattacagacatgcgccaccacgcccggctgtttgtttttttttttgtttgtttttttttttttttggtattttttgtagagacagggtt[139 bp omitted]actaaaatgaagactcttgttttctgaagggaaaaagaaatatttgacaaccagctccttgaagagcggaaccggcgccgtcggtgagggagcagccggctgtgctgtcagcggggcctggcggtggaagcgcctccagtgtgcatgagcgtgtctgaagatggggggctcagggggcacgtttgcgtttggacctgtctgtgcgttctcctgcgtggcagtcctgatttccatgcttctggagaatccatttcgttaacactgaaagccagttctcttttcctggcagtttttttcattttatttttggcattttttacaagataccgttcgggaaaggcttttgaaaggacggaagcgtattcactgtgcgccagtactcctggctgtgctgtggtttctcccgacgtgcacatcgatctcgtatgtgtggcatctgatattaaacgggaggttttaagaagcgtctgccgtgatcatggagcttcggaagcgggaatggttcttccgggtttgctgttttgtctgtttcccccttgtgtggtttccgcctgcgacagttccagaatttgctctcccactcagtgtgctctgcagctgtgaggaaacagccttcgttagaggcgggagcagagacgagccgctgctctgtgtcgtgtttgctgtggccgcagggagaggagcaggacacgcacctttccaggggcctctgtgtcccgcactgtgtgtgagtggaccgcagcgcgcagccacatgccctggctgccatgggccagaccgcctccacctcccccgcccgcctggcctgtcctgagtgcatttccctgcactgtgtcgtcactgcacagccagtcaccgcggtctcagtcatcggcgcggatggctatgctggggtcccagggtggccgcagcagtcagggtcactgtgggagccctggggtggagtgacaaaccgcattgtcctgtgcccgccatggcagaagcgcagcctttgtatggaggcccaaccgcgctcccgtctggagaagcggcttccggggtgtggctgccgggtcggctctggtccacagcacggtgccggggctgcaggttgttgagggctgtgactccgtggggctcagccaggctccagcagggtcagacgtgctgttaagagcaaagccacagacgatgacttgtccattctcagtggatgctccaggctgtgcctacacagcagtgctggtgacatgtccagggttccagggcccggtggcctgggagctgctttctccccactggctgggctgcatctggccctggctggaggccttgctttgaggggctgtgaccctcttcccccaggccctccccagccgacgacagccaccggagaggagatcggaacacgattgtctcagatgcagggcgctgtgcgggacgaagccgcaaggactctcgtatcgggcccttgggactcgggaggtgccagaggcggcggctgctctggacctcggtgttcactgacctttgtttcacttgcctctgctcgactccgagagcaggaaacccggccgtggcctggcagctccgcctcccatgcccgcacgctggggtctgtcttgtctggagcagtggggcacaccccggaggaggcgggggtcagggctgtcggccttggccccctgctggtcgctgtttcggggactcggggcggccagtaccaccgcctgaggcggggctcagcagcgttgcatgtacgggcctcgtactgcctcatggaaaatcctccggagccgccctccattgtgggttcctgagagtaggacacattgccatggttttgtgggaatcacgcgcccctgatggaacttttctgctgttgtgaagtacttttatccatttgcttctctgctgaccttgccaagttgttcgaggtggaattaaacacctcccagacctctggcttgtcttttctgaacccccaaacacatcccactgcatgggttgtccaagcttggaaatgggagagtgaccctgccatccccagggacatggcctggccttggggtggattcccacctcactggcgggcctagggtgctgtttaaacagcagccagaggctgggcgcggtggctcacgcctgcaatcccagcactttgggaggccaaggcaggtggataacctgaggttagaagttcgagaccagcctggccaacatggtaaaacctcatctctgctaaaaaaaattagcgagcatggtggtgggcgcctgtagtcctagcacctggggaggctgaggcaggagaattgcttgaacccgggaggcagaggttgcagtgagccgagatcacgccactgcactccagcctggccacacagtgagactccgtctcaaaaaaataaacagcagccaggggcctcactggggttcatgcctgtggccccagctactggggaggcttagatgggaggaacacttgtttggaggtcaaggctgcggctccagtgagccgagatcacgccactgcactccagccggaatgacgatgagcacctgtgttgcagcatagccctgcccagcaggtggaaccagaatgtgccagaggcccccttgtgcgtcccaccccgcctgcaccctctgcccttactgtcctgtgggctctgagggtgtcaaggccgctgggacaggccctgcctgggtgcttccctcagtaatggggggtcgtgggtgctctgggttgtcagccgggcagttgagtgggagtcaggggtgctgacctcacaggcacggccagtgaggagcattccggggccctgaggatgccagcatgggtggtcctgggctcgccctctccacagcatggctggcgttcctcgactgccgccggagccccgggaagacaggcttgaccccgtgcacacacgcagggagacgccaggagccctgccctcagaagcctgcacgctttgcctctcttctggcagctagctaaccctgcatccccacctgagcctgtccctggcactgaggacactggacctgtgtcactggggtggggtgtcctgggtcctgctgggtgctgagtgtctccatgccaggagctcccgcctctaccatcgagatgaccacagatgtccccagacgtggcctggtgctccgtggaaaactgctgtccacaaaccatggcgtccttcccctgacccccgccccttccctctctggcttggcccagcgggtgtctcagaacctgggtgcgtgcttctgccagccccccaaccacctggcccacactccccaacccccttcactgagccgcagagacccccatgtccctgccaatgctttttccgaagccggtctcacttgttcccgccctggcagtgtgaggggaattggggtcccccctcagtggcacagctgtgcctgtctgatgacttccaccaagcccccttcactgagctgcagagacccccatgtccctgccagtgctttttccgaagccagtctcacttgttcccagcagtgtgaggggaattgaggttccccctcagtggcacagctgtgcctgtcggatcacttccaacaaggtggccttggtggccgcacggggcacttcgtccatcttaaaggggcaacacaggcatgcagcgagaattccaaaccacagaaacctcactctcatgggccccactgcctgaggcattttctgttttgcttttgttggtgggttggttggttggttggttggtttgagacagggtctggctctgttgcccaggctggagtacagtggtgcaaacgtggctcactgcagccttgacctccctggctcaagcgatcctcccacttcagcctcccaagaagctgggaccacaggtgtgcaccaccatgcccggctaatttttgtgcttcttgtagaaatggtgcttgctgtgtttccgaggctaagtgatcctcatcggcctccaaagtgctgagattataggcgagagccactgcagctggcctgcctgagttcttgtgcctctctgcctccctccctgtgccagcctcacgccccctcctcaccttccccaattcctactctcaccccgccctgggtccttcccctctcactggcctgagctgtttctggaactgctgcctgccctctgctcatgtcctgcctctgccccgtgaaaccagctcctccatgttccctgtctcaggggtgtcctccagggcccggagttcctgaaccagattcttctccccacctacctcacctttctgtccagtccgcctatcagtcagccccctttgcagcagaatgccaccccaaaacccagcgcctggaacattctccacacagtttctgtggggccgggatctaagggcagcccggccaggggcttctagggtggctcgtggggctgcagtccacatgctggttggggccacatcatcagaaggctccaacggggctgggggtctgaggagcctcgctgggggcagcagcccaggagccacagcagccgcccatgaatatcaccgccattctgttggtcacacagagcagccccggttgaacgtgaagaccctataggggctgggcttggtggctcacacctgtaatcccagaactctgggaggccaaggtgggcagatcacctgaggtcagaagtttgagcccagcctggccaacatggtgaaaccccatctctactaaaaatacaaaaattagccgggtgtggtggtggatgcgtgtaatctcagctactcaggaggctgaagcaggacaattgcttaaacccaggaggcagaggttgcagtgagctgagattgtgccattgcactccagcctgggggacagagcgagactccgtctcaaaaaaagaaaaaagaccccataggaaggcaagagcctgaacagcaaacgcaagcccaggagccctgtcatcccagcggccagaggaccatcccccttggctcccactgaactcagctgcagtccccaccccatcccccaccaccactagggctaagagccagcagaaatccttgggctggcttcattgttcctcccgggaagagtccagggcagctgacacatgatcccagcatggcacgccggggacaggggaggcactctgctgtccctgactgtatttaaaaaaaaaaaatccacaagcaaaatccctaatgagcaatgttccacagtaagtcctgcctcagaactgtgcaggcatcagaaacaggaatgcctgagaaacggccacggtcccaggagctgaggaaacaccacgcctgatgccacgtagggtcctggatggagccctaggccaggaaagggcattagaggaaacccaggaaacttggatagagtgtagattttggtcagtaataatgtatcatgtgacaaatgtatcacactcatgaactgggcatggggtactcacaactctaaattattctaaaaatattgatataaatttaagaccaaaaccatggccaggcgtggtgcctcactcctgaatcccagcactctgggaggccgaggtgggcagatcacctgaggtcaggagttcgagaccagcctggccaacaaaccctgtctctattcaaaatacaaaaactagccgggcatcgtagtgtgtgcatgtaatcccagctactcaggaggctgaggcaggagaatcacttgatccagggaggtggaggctgcagtgagctgagatcttgccactgtactccagcctgggtgacagagcaagactccatctcaaaaaataaataaataaaaataaaaccaaaaccctacagcacgggcagctatgagaactagagaaggaagagggttttgtgcacctgccagcctcttaggttcttgtcagcttttcccccaagtctttattattattatgtattgtagagatggggtcttgctatgttgcccagactggtctcaagctcctggcttcaagtgatcctcctgcctcggcttcctaaagtgctgggattgcaggtgtgagccaccatgctgggcccctccaatccttttgagctgcccaagaacagagaccaggcctggctttgctcagcagtgggtccccagcccatggcacgaattcagtaaacacttgttgtggtcctcaaggggcccccagtcttgctagtcacctgtgttcacctaatttgagcctctgttttctttactttttctttttcttttttcttttttttttttttttgagatggagtctcactctgtcgcccaggctggagtgcggtggcacgatctcagctcattgcaacctccgcttcccggattcaagtgattctcttgcctcagcctcccgagtagctgggatttagatacagggtttcaccata[131 bp omitted]caaaacctccagtggaattgtgaaaattaaatgatatgcatgcagaaagcgttctgcaaactctgttttgctagtttgggtgtttagtgttagtttttatatcattagtactggttgtaaacttatcaatttaagcaagatggaaaatcgagggtgtgtcagggaagggggaagtttgagctgaaattatgacctcttaggggtgggaagaggaggctttggggttgtgaggtctgagcccccttactttgggatgagtccacatcgcggcgactcctctgcagaatgcggtgatgttgcggtaaggggtccgggatagctgcgaggcagctggaccaatcctgaacgaaagacatcagtgatcgcaagaggcgctaaaacttctgccgaaacccgggatcgaaccagggacctttagatcttcagtctaacgctctcccaactgagctatttcggctgggcggcagagtcgctctcgccgggactccgtcccgcgctgcgccttccctgcgcaggcgcagtcgtttcgcgtcagcaggccccacatcctttgtaaggtctcccagggcgccggagcgcagtgtcgtctctgtggcgcaatcggttagcgcgttcggctgttaaccgaaaggttggtggttcgagcccacccagggacgcgtggtgacttttgccctcctggaataacaagaaaatgagtgtcgcctctgtttttgtcggtccgccgcagacccgcggcccccacgtgcgcactccgatgacctttccgcctcgggtgatctgggggtgcacggcgcaacacgaccacggaggccgaaagcgcagcggaacctcccggctccaggttccggtttccgcatgcgctccgagccgctttgggcggcggccccgggaacccggagcgctaaggagaacggacctcagaggttgtctgaaggccgaggccaagatggcggtgctgtcaggtgagcgcggcaccggcggcgggtgtggggccgcgcgggtctggggccgtgggagcctcgggtgtcgtggtggcgtcgggggtcggtgccggcgtcgtggccgcggtcctctccgggcttctccgagccggccgctcctcgggctccccgcccggcttgcgatgaacggtcgccgttattgcgtccagagtacagtcggggaaaccgaggcccggtaggtcatgacgcaagcctccagcctcaggaaggcgctcggggtggaggctggaggggccccattcacgtccccgagaccagggcacggcccgcgaggctgctcttgagatgccctggagagagcggggcctgcctgacaggctgggaaactgaggcccattgagggtcttcgaggtcacagggccgggcctgggaaggaacaggacccaggacatccacgccaccctgctggaccctccacctccctccccacccctgggaggtaagggcctctcgcagagcctgtcctgctccagggacttttttgggatcagctgaagcctgcggacctctgctcagataaagttattaaatgcatggaataaaatccatagaattgcaaggaaatcagttacacggagaggcagttattaaaagattgtcttgaaacctgattggcgacttagtaatctaagtgcttcccttatgaacgcgatctagcggcaggtctaattgcgactgtgatttggaaggagtgaggagtggaaatgaggctttgatgatacggaaacgtctgcagcccctgcaccatagctaggaaacatctgtgattccgcttggtgaaaagttacaggtcctgctaatactgccgtattttgttgtctatgctaagaattttttatttatttattaagacagggtctgcctctgtcgctcagactggagtgcagtggtgccatcttggctcatcactgcaacctgtgcctcccaggctcaagcgattctggcacttcagtgtcctgtgtagctgggaccacaggtgtgcgccaccatgcctggctagtttttgtatttttagtagagatgggggtcttgccctgttgcccaggctggtctcgaacttctgagttcaagcaatcctcccacctgagcctcccaaagtgctgggagccacggcacccagcctacgctaagaattgaatgaagggctaattttccataagatgctggtgacaacaaagacatatatatttttttattccaagcaaattc[134 bp omitted]gccaacatggagaaaccccgtctctactaaaaatacaaaatcagctgggtgtggtggcgcatgcctgtaatcgcagctactggggggctggggcaagagaatcgcttgaacccgggaggcggaggttgcagtgagctaagattgcaccattgcactccatcctgggcaacaagagtgaaact[132 bp omitted]agaaaccctgtctctactaaaaaatgcaaaattagctgagcgtggtagcaggcgcctgtaatcccagctactcgggaggctgaggcaggagaatagcttgaacctgggaggtggaggttgcagtgagccaagattgtgccgttgcactccagcctgggtgacaagagcgaaactccgtctcaaaacaacaacaacaacaacaaaaaccctgacccagaggcacagaatcccatcacctcagaggttctcagaagagtatctcctctgctaggagctcatccaaagtcctgcattttcagcttgggaaactgacacctggagtggggcagctcccaccagagcctggggctgggcagttagcctgtctgctgtgcccagcctcaggcatgccaagaagtaggtcacaggcttgtgtccttcagagagttgtggcctggacggggccatgggaaacagcaaccccggatgaggctaaggctggggtgagggaggggctcagaggcaggagaaggccccatggatcgctgcattcaggggcatcaaaccctggccctggcccctggaggctgcccacagcctctccatcgggcctcacctcacccacagcgacaaagtaccatcacctgggcagcttcaacagaagctgattgttctcacagttctgggggctggaaggccaagattgggggtcagcagggttggttcctgctgaggcctctgtccttggcttgcccgtggccatcttctccctgcgtctttcctctgtacatgtttgtgtcctgatcgccttttcttacaaggacataagtcatatcggatgagggcccaccctcgtgacctcactgtcctttataatgaccctttattttattttttgagatggagtctccctctgtcacccaagctggagtgcagtggcgcagcctctgctcactgcaacctctacctcccgggttcaagtgattctcctgcctc[134 bp omitted]cggcctcctgaagtgctggaattacaggcatgagccaccacgcccaggcattaatgatccctttaaagaccccatctccaaaagcagtcacattctgaggtcctggggttagggcttcagatgcaggtcgggtggagggtcacagttcagccgtcaccagcaccaagcctgcctttctggattcttccttgtgagccaggattcctggcacctccaggtttcctcccgctgagtgccccgggcgtggcaaggccctgctctggccttagtcttcgcctcgggaaggctctcccaggagacttcgtgcaggcgcgttccctcctctgcgcttcctttgaggctggctcctctaggggtgcttttctgtgtagattgacgtgggcagcgccctccccgcttagcggactgcagattcctgcaggatggggcctgtgctcagctgcgtgggaaacgcccgagcagcagccagggcctggagcacccagcacacgcttgtcaggcacagctgaggccaggacgagcactgggtgcccagggaggccccagcattgctggagtggcaggcaccccacaagcacgcatagatggagatagaaccgggtgccggcaaccggaggacctggggtcctggtgtaggcgggacgccccgggtatctgaactgaaacctgcctcatgagaaggggccagcagtgtgcaagtgtgaggcggggtgtcccccgcagggcagcagccagtgtgcaagtgtgaggcggggtgtcccccacagggcagcagccagtgcgggggccctggcgcaggaaagcggcaggtgccagtgaagatcgccagggcggggagacggggcagcgtttgggttccttccggggccatgcagtctcaagcaggggactaagactctctcgtgttctgaaaaccccctcgttacctaacgtttgttaagtggcactcgagttgggatcagagctaggctgtgcgggcaggagcctgatggggaagcgcctggaggccggccctgcgtgctgcccgcagctcactgttcccaccccgtggtcctctctgcagctcctggcctgcgcggcttccggatccttggtctgcggtgagtgcctgagtctccagccctcagctgggaggggccttcagcagcgacagacgaacggggcggggggggtggggggtggggggagcgccttgttgaaggtcacgtgtcatgttagggacaggatgcaggtgacggtctgcacgctgcccgtgatgtgccgggaccctccctgggacagtccacgcagtggcaaaggctggacagtcaggaggaaaaccctgtgggcccggctcagtgccgtcagagctcaccgccacctggggtgggaaggcattctctgagccctgtgcagatggcagctggggcaggcctcctgcagacccaggtgactgacagggcggtgagggcgcatgcccagggatcttaccttggtcatgtgtggagggcctgctgccagtttccttctgtggatgatcctgggaccgtccttgcttggacactgttgacctgctgggtacgtcacaaaagaagttccattcaagtctgggccatcattgggggtcggggcgatggccgcatggctccagcggctctggccagtggcccaagtgttgacaggcagaggtgagaacagtctcgcagcagggaggggagaggcaggacaacagtgagtgcggctgggggagctggaggggcctgggacagccactgacccgcgttccatctcccggcagctccagcgtgggcccggctgtgcaggcacgaggtgtccatcagagcgtggccaccgatggcccaagcaggtgaagctggccttctgggggaggtcgtaccccctcgccccacccccatcccttccttattttctgcatcagtgccgcagccactgaggtgcatggatggggcagggagggggtcacacatcccagtccctgacctcatgtgggtccaggcctctggcagcggccgtgggggctcgcatccgcctctgggaagcacctgcgtggctgacgcctcctgtgcccgtgtgtctctgtgccagcacccagcctgccctgccaaaggccagagccgtggctcccaaacccagcagccggggcgagtatgtggtggccaagctggatgacctcgtcaactgggcccgccgggtgagtactatgagctgtaggccctcctcgagcgccagggcctctctgcacactcacaggcacacacatacacacaccaacgtgcagacacgtacacacacaacacatgcatgcacactcacatgcgcacatgtgcatgcaagctcacatgtatggacagatgtgtacacggaccacacgcacactcacgcacacaatgcacatatgcacactcgcacacatgcacacttgcacacacatgcacacacaagcacatgtgcacacacgcttgcacacatacacacatgcacacttgcactcatgcacactcatgcgcacatatacacatgcacacgcacactcgcacacacgtgcacatatatgcacagtcatgcacacacatgcacactcacacacatgcacacacgtccttgtgtggacacatgcatgtgtgcctgttggcatgcatgcacacaggcacactcactgatgcacacacacccctgcggccgtggagcagggcggaccctcccggaggcccctgtgctggcctggtggcctgtggttccatctgaggattcggaccctgctggagatgacccctccgtttccgtcattctctttctggcgtccgtgtgttcctcttgtttctcttttaaggtgaaagcagtgttttaagttaaaaggagcgcgtgtgaaggcagtagatccttctcggtacccgtttaaagcctcccctgcctgtggcgccagcccccacgcagcccctgccatccccctgcagcgtgagcacgtgcagctccctccagctcctgcggcacttgctgcgacagcccgggttcaacaatcccccattgatggacgttcactgtttccttttgttttttgtttcctaaacaatgccacggcgaacgtcctgccagggccgcagtggtcgagacaaggatagtttttaatgcaggat[132 bp omitted]cctcctaagtagctgggactacaggtgcccgccaccacgcccgg[182 bp omitted]ccagcggccgtcccaacacaggcttctggcgggcaggtggacctggccatttctgcccgggcagccctgcctcactctgtagcctgaccctgtcacccgccaacacatgcagcagggcccctgccaggtctcagagccgcgtgcagggagagcgggaacggtgggggaaatgagaagccacagggatggaggagaggggagggagtggccaaggagatctgagagggcttcctggaggcgtcgcacttggtatgtggacccagatctagttaacgcagagagttcccggttagacctgcgctactactcgcctgtagcccacgcgctcagagagtggctggagccccctgttgaaatggtgggacttaggatacactgggttcgaggaactatgtgatgaggacagatctcacccgtttctctctattttatgtatttgaatgtggctggtggggcgcgctttacaactcttggggcccggaggccacctgcaggagccgctgtgcctctcacctctgccggctgccgccccgggacatgagtcgggggttctgggtgctccacgtggagtctcacgctgggccacgcggggctccgggggtggcgtctgacccgagcccggcctccgcagagttctctgtggcccatgaccttcggcctggcctgctgcgccgtggagatgatgcacatggcagcaccccgctacgacatggaccgctttggcgtggtcttccgcgccagcccgcgccagtccgacgtcatgatcgtggccggcacactcaccaacaagatggccccagcgcttcgcaaggtaggcctcgtcccagccgcccagccgcccccagagtgagctgcgcacggaccccgcctctcttccaggtctacgaccagatgccggagccgcgctacgtggtctccatggggaggtgagtgcagggcggggggtctccagggacagacgtagcgtgagtgctggcctggccgtgccctgatggcgcttatcaaaagtgtcatctacattcagtgaaatcccacgtggtcccggcgctgcccttcagccgtctcggtgcctccaccctaggcagatgcgctggtgggcctctccccagaacgattcctcccatccacccccacgcagcagaccccacattccgcccagttctctgctttactcacacataagtgatgacaggtgctgtagatagttttataatctcagccttctcacttgccattagttttttttctttttttttttttttttgagacagagtcttgctctgtcaacccaggctggagtgcggtggaaccatctcggctcactgcaacctccgcctcccaggttcaagcaattttcctgcctcagcctcccaagtagctgggattacaggcatgcaccaccacacccagctaatttttgtatttttagtagagacggggttttaccatgttggccaggctggtcttgaactccctcaggtgatccgcctgcctcggcctcccaaagtgctgggattataggcataagccaccacgcctggccttgccctcattttttagtcatttccccgtaacattgaaaggtatttagtctcttaacattttaaaatatttatttatttacttaaagatggagtctagctctgtcgcccaggctggagtgcagtggcacgatctcagcccactacaacctccgcctcccaggttcaagcgattctcctgcctcagcctcccgagtagctgggattacaggcacctgccaccacacctggccaatttttgtatttttagtaaagaagaggtttcaccatgttggctaggatggtctcgatctcctgatctcgtgatccacccacctcagcctcccaaagttctgggattacaggcatgagccaccatgcctggccaatatttattatttttattttttagagacagagtctcactgagttgcccaggctggagtgcagtggtgcagtcatagctcactgcagccttgacctcctgggctcaagcggtcccccaaccttagcctctcagagtgctgggattacagatgtactccactgtgcctactttttaaaatttctgtagagatcaggtcttgataagtttacccttttaaagcgagcagttcagtggtttttaggccaccacctctaattccagaacattctcatcacccccaaatgaaatgctgtccccatcagcagtcactctgcatccccttccgagccccggtgcccacacctcccctccctgtctctgtggatgggcccgtcctggacatttcacagaaacaggatcacacgccgcatggccttctgtgtccggcgtctctcactgagcgcgacgtcctcaaggtgcatccgtgctgtggcctgtgtccgagcctcgtgccttttcttggctgaataatatcccactgtgtggacatattactaatctaattctaaacagttaattagaatattccagagttttcataaccgtctcccactgctgggcattcagggtatgtccatttttacggctgtgggaagcagtgctgggagtggagtctgtgtggtctcctggggtttccagctccctgccccgggtggaccccagcgcctcactgacagagccggaatcaggcgagggtgaggctcagccgccccatagacaggggctgggtgttggcactgtggctgtctgaagtggctttttgttgacacatgtgatctgacacatcccagccccgggaatcggtggtcaggagccccctcgggaggggagcacttttccccgagttatcagccacgtgtgagcttgcgccccactggtcccacagaggctctgggagcctgtgcgtgtttgctcattgcttctccgtgacaagttccagcctcgtaggtgcctggcctgcagttgaaggcgggtggggatggggcgaggcctcgtggagggagggtgggcaggcgggtcttcggcacactcccctcacggtgcctccccaacagctgcgccaacggaggaggctactaccactattcctactcggtggtgaggggctgcgaccgcatcgtgcccgtggacatctacatcccaggtagggccgggaccgcaccgcccacgagggagctggagacagggccagcgccacacggagcccggcggcccctgtgagggagtcccacacccccagcagacggcgggctcccccatcctatggatgggccgactcggagcgctgcctcttagtggagcctgtcccctgtgagaagtcggcgatgtattcaggcatcagagggatcagagggagcaggggaagctgagtggaattcctgacacacgcctggtttacagcagtttcatatggtcctacctggcacaaaccaaagacctgcagttagaaataccaagcgagaaggttcctgggggccaaggacactgtcccgcgccctcagccttacagaagggcacgcaggactccctgggacccggggtggccggatttggcaaatgaaaacgtgggaggcttagtttgactgtgaggttagggtgaatttgaccatcaggaaaactgttagtagtaattgtttagtacgagtatatcccaacaatatttgggctatactgacactaaaaagagcattggctgcatacctgaaattcacatcgcaccgggaacattctttatatctggtgatcccgtgggactcttgcacctcacgtggtcccacgagggccatccccccgggcgttcaccttgacagtggtccacggtaggcaggcttggaggtggcgctcatgtgggacaggggacagagtcctgttcttggccaccctgtgctgcgtgcggcattagctcatgcgcagagagcccagccctgagtcccgagtctgggggtttgggcaagcgagaggcacatcctggtgcctctcaaaagtggaggaacaggctctgactttggattccgcttccctggaaagggcgttgatttgttcagcgttctgcacggttcaggtcaccccgggggcagtggagagggcagcctgggcctccctgtgacttgacagcacagagaggtccatcctggggtcaggagctctgcccatgcccctggcgtcttcccctgcagtgcagaccaatggggcaagttgcgagtgtggactgtactcctccctccttgcagactgagctcctccctccctggggaccgcgctcctccctccctgcggactgtgctccctgtctggggactgcgctcctccctccttggggaccgtgctcctccctccctccctgcggaccgcgctcctccctccctggggaccgcgctcctccctccctgcggaccgcgctcggccctccctggggaccgcgcccctccctcccagcggaccgcgctcctccctccctggggacctcgctcctccctccctccctgcggactgtgctgctccctccctgcggactgtgcttctccctcccttggagcagcctggacttgccagagctctgccaggtggggcctggccgccctttcccaggccctgcagtggccttgtcctttctcacctgtttccactcctgctgtccccgttgggccctgggcttcgtcctcttgctcaagccctttgttctgaacctgcgtggcagccgggactgggggatccccagcaaagagctctggcttggggctcagaaagagggtcatcgggtcctcgtgggatgcccgggctctgggccacctcccctccctccgcccagcctccctgcctccatctccgtccagggcagccccgggccctgctccccactgctaagtgtgtctgctgagcgctggcccccattgagtcctgagggctggggccgggggccgggttagtgaggtcagcgtcttgtccgagaggtccctgtgacagcccgggatgagccacgggtggagggcagtggggccttgcccaggggaggaccccactcttcctgcagggacctcccctgcgccggctcccagtccctggcactgcgcccacccagggctgtcagcctccaccttcagaggccggcccgggaaacccttccaaagccgagccggctgcgctgtgcacgcggtcacgcgggctccggctgcgggaagcgagactgaggcaaggtccctgcaggctgcccacctacggccgaggccctgctctacggcatcctgcagctgcagaggaagatcaagcgggagcggaggctgcagatctggtaccgcaggtagcgccgccgccgccgccgccggagcctgtcgccgtcctgtccccagcctgcttgtgtcccgtgaggttgtcaataaacctgccctcgggctgccgcctcccagtgtggtgtgtgggtgaaaggagccggggacgtggggggatcacagaccccctgcggcgtgccgcccttgggctgggggcggttggagcagagccgggggcagagacgggcactgtgcctgccagcagggtcctttcccgctgctctgcgaagaccctggggtggacatcgtggcccaaagtcccgagcgtggaaggccgcacacccatccttcctgggagggccctgactcagtctccctctatgccctaaggcaggctgagcaaagcccgtctgagcctgccccggggttcagagtgtggcctgtggcctgcgtgtggacttgggcaggtcgccactgccctctggcccatttccaggcggtggcatgggctggttagctgagggctggggccagggagatggggaggtggcacctggtccaaaccaaagggctgcagggcaggactgtgagcctcacaggctgtctgaccccactttggggaccctctccacccagggctttcggggaaccctgactccaccccaccagccccttcatccgtcgaagtccaggcctcatcagggacgtgcattcattcagcaaacgtcccatcttcctgtgttcagcgccagatgccgccggtgctgggacctcgctctgcaggcccaccctgcatgcctgctgcacaccagggacagttctggggatcggcagttatgacgggccaggctgggatggggcccgggagactggggcgggggtggggaagaggcacccagcccagccgggtcaagcagcctggaagcaggacatgctggggtggggacagggcgtcagccagcggaacagcagccctgggccagagtgcagagcacaggagccggccttctctcagggcaaggaggtcagtggagggggcgagcaggacggccccaggaagatgggcgggctgcacacatgtggatgcagggggcaaagtgggaggcatggggtgaccagctgggcacaagggcacagacaggcaggacccgggatgttcctggggctgggcaggtggggctgcccctgcaatgggcccagcaggggcgatgcctcctgagaggaaaccacatctggaaatgggaggcttggggaacggggctgtcagcagccacgcccctcctggggcgggaggaggggagctcagggtgtgctggggcgggcagagaagtgggttcctgcctggggtgggcaaagatccttgtcccacccacaccccggccgtggtgctgccaccccctgagaccctgacctagttacccccttccctgaccccactgcaaagggtcaggtggctttcatctgaggaagggacatcgggcatcagctggagatgtctgctatgggcaagacagtggggggggcggggcggatcctggggccgctcagaaacctggaggggagtcacccacttttcctgtgtccatgggatgggcgggaggtgagggagcagccgctggaagtaacagtcgcacgctcactgccgactggccaagcccagcgccggcgtttacttcacctcagggaccctgcagtgggcagcagtgaccctcacagagaagctgggaaagctgctggtgacacacagctgggatcagccctgggctggtgggacccctcacagagaagccgggaaagcttctggtgacacacagctgggatcagcccagggctggtgcgacaccctggactcccggccaggaaggcacggaggagggcatgggtgtggccgggccggggtgggggctcagcctttggtcaccaggggcgtgatcatctgtgggaaggcgtagtagcggcagtcggccggtgggaccagcgccatcacctccgtacggatgttctccctccggaagccggcctccagcagcgcgggcacctgcgtctcctggtcggggatggcaccaggtcacctctgagggccatgggggtcacgtgcaccctggcgcccacccctcattgaagagtgtttacagatggcaaggcccgggtgggcggctgcagctcccgtgggcacgtggcagggcagccctggaagcccaggtgtgaacgggaatctccagctccccagtgcgggcagcagcttcccggctgtcctggaaccccagccccacactcgagccacccccgggcacctactccacagttctccagaccttgccagtgtggcgggtggagccaaagaatcacaccagaaaaagaacacaggccactagttcccattttggaagaaaagctgccccaggggccacaggcacccagccggctctcacaacagcagcccagggcaaccacatagagcccttctcagataggccgcctccaccaggcagagggaacagcgagacaagcactgctgaaccagcaaagacagccaggtggaggcagctggagggaggggaacacgcagggcttaggctgaaccacagggcactggggagccatgggaggttgttgagctggtgagggactttgatttccattttttttgtttttgttttgttgagatggagtctcggtctgttgcccaggctggagtacaacggtgcaatctcggctcacagcaacctccgcctcccatgttcaagtgattctcatgcctcagcctcccgagtagctggaattacaggcgcccgccaccacgcctggctaacttttgtatttttagtagagatgggattctgccatgttggccaggctaggctcaaactcctgggctcaagtgatccacccgccttggccttccgaagtgccgggatcacaggtgtgagccaccacgcccagcctgatttccattttttttttaaattttctttctttctttctttctttcttttttcttgagacagggtctggctctgttacccaggctggagtgcagtggttcgatctgggctcactgcaacctctgcccctggggcccaagcaatcctcctacctcagcctcccaagtagctgggagtacaggcacacgccaccacgcccagctagttttttgtattttttttttttaggaaagatgaggtcttgctctgtagcccaggctggtcttgaactcctaggctcaagcaatctgcccacctcggccttccacagtgctgggattatagacctgagccactgctcctggcagccactgcgccaggcaaaggactttgatttctaaatgaaccagcacagtccagcccacccagggggtcaggaagggaccctccccaggtagcaaggtggctccagcagccccttcccacccccatccaaggtcacttcctggagacccatggggaacttcaggtgggcgcacctcaaacatgatggtgatgtctgagtacttggacttcatcagctccccccaggaggtgaggttgcagtaggtgaggacgccccccggcttcagcaggcgaaaggcgtggttctgtggaaggggagtggccagtggtcaggacggaggtgggggtgtgggcagaggggcttccccgagggcctcccgcatcccagcaagtcagagagaaccaccttgatgaagttgaactggtgtgtgtgccaggtctcctccgagagtgggtacgtgtcgtacaggatccctgcacggagaacagaagcccacgcggtcagggccgggctcagcgcctcacccagcctcacccggctcatcccccagcgggtggaggtgcagtgagacggggccgtgggtagaggtggggctcccacacaggcttgagaaccccgagatcgcctccagggcccctccgtgagcatgcccatccccggtgctccgccatcccacagccaggcccacacccacttgggctctgtccccccagtgcacatcagagggacccccacaagcaaaggaggggctgcattggagctggggaggcccaccctgtgatacgtcccctcacccctcaccatcaaagtgaccgtcaggcagggtgggtgccacatcctcccacaggcctttcaaggggatgaccttgcagaggggaaaagaaaaagagaggacagggtagagaggtccccaggatctccccacctgcagaaagggagcggccagggggactcccgagagagaagaccacctcctccacctctgacagccccaggcccccaacccccaggaagcagtgccctcaccccaaggagtgggggtcctggagggcctgcgggcagaggggcaccttgtgtgtctgccgtggggcccagtcccggagccgctggaagacgccgtcattgcactcgatgatccaatgctcatcaatgggcgcctcctgcacctttgacgctgcgatggccatgccaaagcccacctccaggacccggccccctgggcagacacagggcgcctggcatcactaggtggggcgggcttaggaggctgcctggaggaggggcacagggcagggcagggctggggagactgcctggaggagggggcgcagggctgggctgggggtctgcctggaggggggcgtgcagagcagggctggagaggctgcctggaggagggggtgtggggcaatgctggggaggctgcctggaggagggggtgcggggcagggctggagaggctgccaggaggaggggatgcagggctggggaggctgtctggaagagggggtgcagagcagggctggggaggcttcctggaggagggggcacagggtagggcagggctgagctgggggtctgcttggaggagggggtgcagggctgaactaggctatgtgagtcacatttgccacaggacgggagggcaccctgggccagcatggacagaggcgggcggaacacagtagtcctgagcgggaacagcgtgggccctggccagcggccagagagaggatgaccagccagggaggccgaagacggccgcttttggggccaggcctgtggggaggcgagagccttggactttgagcccagcccacgctgtttgtcccgggtcccttatctctcgggttagttacttttctctccccctccctctatccgaaagttggatttgcaagagtggccaggcaagacctggacttgagactatctgggaggggaaggactggtccccagtgggccacacatgggccccccgctcaatcctgattggcactggacactggacgtgcccattttcagggtgggaacactgaggcccgacccctggacggggcctgtgtggggccagggagtcctttcttagcagcccttagcgtctgacgccaggcaggccagggccaccccggggacagctgtctccctgagctcagctttccgagtgctattcttagccgggcgagtcggggctgctctcccaggcaggcagaagggcagcctctccctggcacgaccccttcctcccgacctcagacagggagctggggacccggttccacccagtttcacccaggtctcacgtttgaggtccccatctggagagcggggggcctcactccccctggagaggaagtttctggtacttaggcggtgcctaacgtgtgcgggccccacgcctgccgcactccccgtgaacgcctccgtgtgcccccacctgcagccccacttcccaggcgaggagacagaggcgccccggcgggagggtgggctgcagagtccccgggtcggggcagccccggcctcagtttcccctgcgcccccgggggcggtgcaggccgggcgggggctacctttggaggaggcggcggcggccagcgcgtgcatatagggggtctcccagcgctccatcaccggcttgcccaggatgcgcaggtgcgtgtccgctgcgtcgtaggccgcgggcgccgccccccacgcggggctgcagttctcgccgggcgcgaagatgggggtcgcgctgggggcgctcatgctgcaggctggacggcgacccgacctcgatcgcgcgccgcccgggcccgctccctgcaggggcttgtgggccgggggcgggtccaacaggcccggggggcggacccgcgagaggacgcgcgcgcgcggctccgggagcggcctctagcggcggccacgcgagaggtggcgggagtggggtcggggccccggccgccccctccccaaggagcctcggtgccccctctgcggagcgggcaccgcagccccgcgcccggggacgcgaacctgcaggctggggactggaatccccgccttgccgcttacgcgccatagattcctcatctgtcagcaccgcagaaaggccccctcctcgctggggtgtgagaatctgaggatcttccaggcgctgttggaagtgctttaagtgtttaaaatcatttaatcttcagaagatgctacagtgagttctgtctttttttaatagagacggggtcttgctatgttgcccaggttggtctcaaactcctgggcgcaagcgatcctcccgcttcagcctcccaaagtgttgggattacaggcgtgagccaccgcgcccgccaggttctatgatgactgtcgtttttccttccttccttccttcctttcttttttgaaagcaagtttattaaggaataaaaatgaatggctactccatagagcagccgactgtcattttacagatgtggaaactgaggctttgagaagcaaagccggtggtctggtggccacgagggtggggacccagcattagagctctgatgcccccctttcatgagcccatgtcacacccccataggctgggggtcatctgagaccccgggtccctaatgggggattccgcccaaagacgcctccagttctggagaccaggactcaatcccagcagtgccctttcctccggcggccctgcagctggggtgtgcgggggtggaattaggcctcccccagcccagggtagccccttagggtcaagcacaccccccgcctgtttcctgggggcccccaagcccgctgcggtggcgtcctggctctgatagccggtttccttccccctctgaacgtggggccacagtcatgagccctgagcactgcctgcctgcctgcctgcctgcctgccgtgcgttctgcacgggttaacagatgcagttattatgcccatttaacacgagggaaactgaggcccagagaggttgaggttcacaggttgcagcagggccacggtgtgaacgcaggcagcctcggaaacagctcccgcgcgcggccttccctgcgccaccttgtctgggtagctgcctgccccatcactgcctgctcaacgcctccacatgcccctgccacctcttgcacagctccttagccccgggccttggcacacgctcttccccttgcccagacagcctctctcctggtcaggccgctttctcgttctgtctcaagctgagcccacgtgtcctctaggagacacccccattctgccccaggacaggcatgtcctggtcagaagctgttttgtttgtttttgtttttctgagacagagtctcactctgttgctcaggttggagtgcagtggcatgattttggctcagtgcaacctctgcctcccgggttcaagcgattctcctacctcagcctcctgggtagctgtgatgacaggcgcccgccaccaagcccggctaattttttttttttttttttttttttgtatttttagtagaaacggggtttcaccatgttagccaggatggtcttgatctcctgacctcgtgattcacccgcctcggcctcctaaagtgctgggattgcaaggtgtgagccaccgcacccacccggccagaagctgttttctctctctttggtagttcactaacggaaggtatttcttcatggtcctagcgtccctctcacagggctgtcagtgatcctggcacacagaacatgcttgataggctgggtgcagcagctcccacctgtgatcccagtgcctgggggaggtgcaggggctcaggcctgtgatcccaccactttgggatgccgaggtagaaggattgcttcagtgcaagagttaagaccagcttagaccacacacagagaccttgtctctacaaaaaaaaaaaagttttaaaaattagccagggccgggcgcggtggctcacgcgtgtaatcccagcactttgggaggctgaggtgggcggatcccctgagaccagcctggcaacacggtgaaaccccatgtctacaaaaatacaaaaatagctgggcgtggtggtgggtgcctgtaatcccagctactcaggaggctgaggcaggagaatcgcttgaacccgggaggcggaggttgcagagaacatcactctcagtgaaataagccagtcgcaacaggacaaatcctatgtgagtccactcctaggaggtccctggagtcctccgatccacagagacagaacgtaggatggcggggggggggggtgccaggggctggggaggggacagggagtgagtatttcacggggcagagtttcagtttgggaagatgagaaggttctggagaggacggcggtgatggttgcacaacaatgggaatgcgcttaatgccaatgagctgtgcacctacaaataattaaaatggggccgggcgtggcggctcacgcctgtcatcccagcactttgggaggccaaggcgggcagatcacctgaggtcaggagttcgagaccagcctcaacatggagaaaccccgtctctactaaaaatacaaaattagccgggcgtggtggtgcgtgcctgtagtcccggctattcgggaggctgaggcagaattacttgaacctgggaggcggaggttgtggtgagccgagatcgagccattgcactccagcctgggcaacaagagagaaactccatctcaaaataaataaataaaataaaaacaaaaataattaaaatggaaaattttatgtcacatatattttaccacaagaaaaaaaggggaccaaaactacataccgtgtgttggatctgtttatagtcacactgggagtaaattcagatcagtatctgcacagcctttttctcgctgcctttgccctggagtggaaggaaggaaatgaatggggaagagggagaagcggagaagtagcctcttctagttctttcttccttccttttttttctttttcttttcttttcttttttttgaggtggggtctcgcactgtagcccaggctggagtgcagtggcgcgatctcggctcactgcaacctgcacctctcatgatcaagcgattctcctgccccagcctcctgagtagctgggattacaggcatccgccaccacacctggcttttttttttttttttgagatggagtcttgcactgtcgcccaggctggagtgcaatggtgtgatctcggctcgctacaacctctgcctcccgggttcaagcgactctcctgcctcagccccctgagtagctgggattacaggcacccgccaccacgcctgcctaatttttgtatttttagtacagacagggtctcg[143 bp omitted]gacttccttctttgggccacattctgtgcatttcatccacccactgcttcattgttcatttatccagtcaccaatagatggatgtgtggttatttcaaatgttccagtcttgttttgttttgtttttgatagaaacagggtcttgccatgttggccaggctggtctcgaactcctgacctcaggtgacccgcccacctcggcctcccaaattgctgggatcacatgtgtgagccactgagcccagattttttttttttttttggcagggtttggctccgtggcccaggctggagtgcagtagtgcgatgtcggctcactgaaacctccaactcctgagctccagccatcctcctgcctcagcctccaagtagctaggactgcaggtgcgtgccaccaaacctggctgatttttgtattattattattattattattttttgtagagatggggttttgtcatgttggccaggctggtcttgaactcctgggctcaagcgatcctctcatctcagccttccaaggtgctgggattacaggcatgagccactgcatccggccagttttattttaaatggggttttagtcccagctacttgggaggctgaggagggaggatagctggagtccaggagttcaaggctgcagtgagctatgactgcatcattgcactccagcttgggcaacagagtgagagcctgtctcaaaataaaagaaaaaaaagtgttttgtactatttgtctgtgatcttgttccttgtattttttttttttgagacagagtcttgccgtgtcgcccaggctggagtgtagtggcacgatctcggctcactgcaagctctgcctcctgggttcaagcaattctactgcctcagcctcctgagtagctgggactacaggcgcctgccac[138 bp omitted]ctcggcccttttttttctaagagggagtcttgctctgttgcccaggttggtgtgcagtggcgcgatctcggctcactgcaacctctacttcctgccttcaagcatttctccggccttagctt[131 bp omitted]ggcctcccaaagtgttgggattataggcgtgcgccacctcacccggccttgttccttgtatttatttaattctgtgatgatgaataaaccaaacgatcaggctgtcaatgtgctgtgagattaaggagaaaagcagtaggcagcacgtacccggttttacaaaaccctgcgggtcacctgtttactaccgtcagcctagaccggtttttccacctccttctgctgacattggaggacgggtatcattctttttggggggtcgtcgtgtgcactgcagggtgctgagcggcatgtctggtctggacccactcgatgccagcagcaccccgcactcaagttgtgacaaccaaaaccgtgttttcagacattgccaagttatcccctagggggcaaagtcacccagaagaagaaccactgatgtatgcaattaacagatgcaactaaaacagtatttggctattaatagtaatagcacttggggggggggtcaataatatcttttcatagtcattgaatttagttaattgttttgatttgattccagttcagccccgaactgggtgaccttggccaagtgactcagcctctcggaccctcgggatcctcttctgtgaaatgcggacaggggaaggagcctcgcgcgggacgctcacgtgccgttcccgctccgtccgcccgcctggggtgcgggcgggtacactcccactccccgcagcgccccacgcggctccaccgcttccgagtgaagagttaaagaggaagcggcagccgcgcctgcgcccacagtgcctagcccggagcgccggtctcgcaagcgcgcacgcgcacgcaagcccgcacgcgcgcgcacgcacgcacgtggctcggcccgcgcgcatcctccccttgcaggggcggggccagcgcagggactccatttcccagcgtgccccgcggcaacgccaggagcctccgaggagaaaggaaaacgcgcgacggccccgactgcggcggcgcgaaatccgcctcagggacgcacgcacagacggagtacccctggacccgcccccggagaccccgtgcgggagcgcgcccgggcgtgcgcaggggcggcggcgcggcggcgcggggacgcgcggtgaccgttggcgccgaggggaggaggcagccgccgccgccgccgccgccgccgccgccgccgccgccgccgttgcgcagatccgggccgcggctgtggggagggcgacggagcgggtgaccttccggaggcgggagcgagcgaggaggcccgggagcgccgagcgtcgccgccgccgccgccatgaacaactcgggcgccgacgagatcgggtgaggacgagcggcgcgggcctgcgtctccgccccgagcccggcccgccgctccccgccgcccggcctcagacgccgccccccggggccgccccgtcaaggtcacgccggccgggggcggactcgggacccggactcgccgcggcttcgcgccgggggccctggacgggtgcccggggtctgggggggtcctggcgcccccgccgccgcttcccggcttcccgtcctgggggatcctgaaggagagcctgaggggtccggggggccccgccgccgcctccagacttcctggtcgggggaaccccgaacggcaacctgggggggtgtcctggggcgcccgtgccgccgcttcccgactgcgcgtcctgagggaccccgaatgggagccagaggggttcaggggcccccgccgccgcttcctggttgtggcggccccgaacgggaacttgggggggtctggagcgtccccgttgccgcctgtagggcttcctggcctgggggaccccgaatgagaacctgagggagtctgcggggagtccagggcgccgtcgccgccgcctcccggcttcctggccagggggaccccaaactgtggcgtggggggtggtccggggcgcccccagcgcgcgcccaaacttggcgggcggcgcacgtggcgagccgaggcgagggttccggttctgccaccgcccaacctatcccactcggggctccgggctccccgctcccatcccacccccccaaagtggtaaggtcgggaggggttcgcaaacccagggcccagggggctcgggtcagccggggcctgctgtgtttacgttgcctcggcgcctccccgccgggggtgggcttgagctgcggaagggagagtcagcgcttccgaggcggcgacgggcccgcggatctttgctgcgccgaggcgtcccctcctataggagcctgacctgctccggaccccgcggggccgggaaacctcatttcgctgtgccccagggctcggcgccattctttggtaggagcggctcctgccgcagcgacgtcgttttagagttgcattcttccggcaaaacagtctgggttgggtttcctagtggtctggtgtaaatttctcggtgcccttagctttgagcagcgccctgtgttctcagcgctgggcttggctagtgcgggagcggttgctgctagagggttgccttggcaggcgcctctcgcaccagctacaggtcacacttgtggatgggaaatgccttttgtgggctctccccctccccagacaaaacaaaagagcaccttccgttggagaaccaggatgaaagcacttagcccctgcctagcccgtgctgtgagtcctctccaggcactttgacttggcagggtccgtgtgcctgtgtgagggacattgcagggatgggcctgagcagggagtccaccggccatgggggatggagccatcgactttggggtgaggcagggaaagggctcccagatggggtacctggattaggtccattcaagccgcgggtgaacgtgggcccgctccacccaagccgtggctgtgaggaggctggagagaggtgagggctcctgtcccctccctgcatggacacccttgggaagtggggcagctggggtcccagcctgggtctggaggggtcccacccacagcacaaataggctcgcaggccacccggacgccacgggctgcgtggaggagaactggagtgcatggaccctgctctcctccccggctgccaggagtgtccactgctttctaagtcagactccttgggcaagaagtgttgccacagccgcccgtcgcatgggagaccggcttccattctatgcggagtccacggtctgctctgatcttgctgtgtggagttgttgtgtgcgtgaaatgcttgtgaccctgcgaagcgccctcctggcaagtcccctgcaggtgcggtgggtgccatgcaggagggtgctgagcttggatggaagcaggccctctctgcggcagatggcggctctcaggacgccatgggtctgcggtgtcccttacccactgggggggctcggcagcctgaggagctccctcttcctgatgcagagccctcactgctcactgccatggaggaggcaggagatcccgccggaccccgcttggagggctgggcctggagcatgcatgggtgcggggtcaacgcctcaggagacttggagcttgggagccccctgttctgggacacttgtggccgtccagctgctgccctgggaatccacacctggaaggtgggttagggagccatccttgggggaagctctgcttttgagtctgagaagtcgtcccaagttttgagggtccctgtgctggcttagaagtccatgtaaagcttgatgggggatgaaagtcagctgaggcctgccggtgataacggatgccttacacacaccgacttccagtcagcttgaggggggcttcatgcaggaggaagcgcatacgtgtggtggggtgtggggagtccctctctggatcctggtgggtttggcacgcggaccctacatggtggatgtgatggacagtgtcctcctttgggagcggggcctgtcctggtcctcttgtgaagggtgggggacaggcactgacctgtcaggagggttagagggttggcaccagcaggtggcctggagcgctcagagcacgcgcgatcaggaaggcccgagtctccagtgtgccctccctggccttgtgaagtcatcttaaagtctggcttgagcgcctctgacttggattctgggaagctgacacagcgcggccggggtcgccacatcctgttgagtagccgctgggtgctaggcgcctgggtggtagaccaggtgtcagggatagggcccatgcctggcctactggggagaggacagaggctcagaggggtcacctcgagcgcccaggccattgtgttctgctggcttccaaggcagcacacggtcatggaactggagagagaggtttatggaagattttatctggtacactggggaatggtaagacagggacacctggaaatattgtaggaaagtcacagagggaggaaggactcagcggagagaggagaaagccgcctctgggcagcttcgaggatacccaggactgtggccgggggccatgcagctcagagccaggcccatggcaggtctctgggtttattgggtggctgtggaaggagacatcctgagtggggctcctggctgggcccctagaggccgtgactacttgtacctgtgcagagtgagcacaaggcacctggcaagattgttggtcaggccagagagggccgtgatctgggggaggctgttgcagtgcggggagtgatagggaacctcatggggccgtgccggcctttctggggctctcttggtgcatttggagttattccgaggcaggtctcctgggctctgtcagcactctggcctggatcactctggggcaccgtgggcactgcagggtgctgggcagcacctttggcctccattcactccgggtcaggagtacccccagtcgtgacaaccacaaatgttcccagacatcacccagtgtcctgctggggggagagccactgtctgggagcatctgtgcttttggcctggttgcccctgcgctgggggccgctgctccttgtggtttatggcttgtcctgtgtcggctcctttgattcctgtgaatgggccttgagggtggatgtgctcctgactggctcgccttggctccaatggtctggagcaggccggtgtctagaaaggcagcagcatggaccctggcgcttgcccttcacacagcagctccccagtggcccagagctagcagcagcgcgcagcgtgcccagctgtgcttgtagccttggctctaacccttggctttgccagagagactgaggcacagaggagttgagggatgggcccggggtcaccccagggggtggaagatccggagctgggagtccacactcctccactgcccgccccgcacagagggcgctcctggtcaggcggctatgttcatggtgcgacccgtcaatctgaggttgtgctgtcttctgtgaactgaggccttttcccatccaggcctggtccccgtgacaccatgtcatgatgtcagaatccctgagagctgtgacagggcttttggcagaggccagtcattcgacagatgcttataggctgagcttccagcttggctccaggcgttgccaaggagaacactggtccgcctgggagggcggggctggcagggagaggatgagggtgaccacagttagcacccaggatgtgggcattcaggggctccttcagcacacagcagcgcgttccagttcacggaccgctcctgtgttctgtggaccccacaccctgcaggcgtgggctggagggggggcatctgaccctgctggggagagggagtccaggctatggaggggcgggctgggctcactggcctgaggcagtgggtgaagtggtcctggtttcccacctggtcttaggggcaggaaagtccctagaggctcttcctgatgctctggaagaagagaagggttccccacacatcagccgccactgggcctggacttctgcctcttgagattgtgcacggagctgagtgtgactggcggagcccagagccaggtggggtctgtggggaggcaggctcctcctggcttggtcccccggcccagcaggaagggaaaggtcgcctgccaactgcccccattgaggctgctggccccgaatggccgggctggccgccggtttttgaagcccactctggtgctgccaggaggtcagggctctttgtggtcagcctaggccagaggaagcctctgcagatggactttacgcataaataccgcacaggcacccgaatggcacgcagcaagcgaggttgccatccaaaacggcttttgctttaacaggcagaagagggtggctgcgccggccaccgtggattgagcacctgccaggtgtcgagctgcaggccctgggtgccaggcttgcagatcctgggagatgttcatcatgacctttgatgggcagactgcacgctggactccaggttgcaagggaagaagtggagctcgtcccacgcctcccccactaatgagaacaccccttttgggtttgtggggtgtgaggtctgtaggagccacgacttccagtgtcggagatgccgtcagctgggtgatgactctcccacccagcgggcccctcagaggcagggtgcaggagccacattgctcaccgaccccttcatctgcgtaggccagtgttgccttgccccgttaacgtcctcagtccacacgccgccagccaaggtgcaggctgagcaagcctggagctgaggacaagcggaccgccagccccgtagcaagcccacgagagccagcagctcctccttttggcctctgcccgcgcccggcttcctggactccgacgtttacttgtgtgagagttggttctgctgcctgggcagttgatggacagtgtctgggaggtgcctgcccagggctccgcatgtttctgatgtgccggcttctcactcacgacctggtgaggttggcagccaggagctttcttattttattgattaaaacatcctgagattcagaagtagggactttgtgccagggccctggaggcagtccctgccactgaagagatgaccctgctttccgggacttcccggaggcttctgtctgtagaccagggagaaggtgttcgccggtggctcctgagtggtagtaaaagacacatggacacaggaagctttagcgttagaagctgctctcaaatatctcaacagaaacacacagtgtggccgcgcgcggtgcctcacgcctgtcatcctagcactttgggaggccgaggcgggcgggtcacctgcggtggggagctccagacacagctatgtgaaacgaaagctatctgttgctgtctcagattccataaggactgagacttgtttcaaaagaaactgaaattctgtcttgttctcagtaatgaaagtcttttataccataattgtatatataacttctgacttacaggaaaattacaaaaattcccatatcctcttggccctgccagactcaccattggctgacattttaccctttggcacgtggtgcctcttgccccacccccagtgaactgtgtgtgtgtgtgtgtgtgtgtgtgtgtgtgtgtgtgtgtgtttagatggaccctcactctgtcgcccaggctggagtgcagtggcttgatcttggctcagtgcaacctccgcctcccgggttcaagcagtacacctcgagctcagcctcccgagtggctaggattacaggtgcgcaccaccgagcccagctaatttttgtatttttagtagagatggggttttgccatgttggccaggctggtctcgaactcctgacctcaggtgatccgcccacctcagccttgcaaagtgctgggattacaggcgtgagccagtgcacccatccccactgtgtgtgtttctactgaaatatttgagagtagctggagaccgatgcagtcccctttatgtgtacactgagatatctattgtttcccaagaacaatgacattctctcacatgaacacagcacagtgatcaaaattgagaaagtggccgggcgcagctactcacgcctgtcatcccagcactttgagaggc[134 bp omitted]gaatcgcttgaacccgggaggcggaggttgcagtgagctgagatcgcgccactacactccagcctgggcaacacagcgagacaatttttcaaaaaaaaattgagaaagtatttattattttttaaaattgtatttgagtattttttatttttttaattttatttaagagtattttttattttttttttaattttatttaagagatgagatctctgtcacccctgctggagtgcagtgacacaatcacggctcactgcagcctcgaccttgactcaaacgatccttctgcctcagcctcccaagtagctgggactacaggtgcctgccaccacctggagtctcgttacgttgcccaggctggtcttgaactcctggcctcccgtaatgctgtgattataggcgtgatctgcgcccagctgagaaagacagtactgataccaggttatctaacccccccggccctgtttcaggtttctcagctgagcgtttctagcccttcccccttaatacacaatttttgaaatttaaatgaagaccgaaactggactggtctgacgagttccttctgccagtgaggtgggggtggagggggtactgggctgcttggaggacacctgcctgttacctggctgttgggtgggtgcagtgctgactacaggctgctgtttcttcaagtgacttggatttggtttggttttcagggttttatgtgtgtgtgtgtgtgtgtgtgtgtgtgtgtgtgtgttttgtttttttttttttttttgagaactgcttgaactttaattccaaaggattgtgtaaatgagcatttttccggtcggttccagccaggcttgggggcccttccttcatggggtgggggctgctgctggctcctgctgggtgccgggccctgctggcagggatgtgggcggggctggccctgactcagcgcgggcacagcctatggagagtgaggcacagcctatggagagtgaggcacgcggaggcctcgctcctcccacggtctctaggcctgacctcaacgctccctggcctgattgcgaagggtgcgtgggagacgtaggattttaagttaatgaggcctcaacctaagcctgttgctgttgcgtgatcagcatggttttccctgaaatttgccttttcagatctcgtctctaagggtcaggaagcacagggcggctggcacaccccgcctctaattcttcccgcctcagccctccccaccgaagaacggggctggggggttgcttgttgacgttttgaagacggcagtgggtgcctttcctgtggtgggaacatgctttgtttttcacacactaaatttaaatcagtcgttcttagggaaaaaagaaggaacagggacaagctcctggcggttggctgtggcagacacttcaccaggggctgactcgcgggggctgagtgtacaggccccaggtggtggttgatgagaggtgatgagtgtgccagccaccttgcaggggtctttcctggcgagctggcaggagcagggaggagcacgttgctcctgctgctggtggggcagtaacgtgttcaacctgacagcgacgtttttgctgaaagccgaagccaagggtggtgtggttggccgtcagggatacagggccccgcgtgggaatggtgctttcagtgaggctggcaggattcttgcggctcaggtgggagctttggcctgcacggtgttttgctctctggagaccaagggtgatgatggtgctggcactgagtcacagctgagattcagctcagggacttcatttctgaatgcgtgtcctctttcccagggaaagcaggcaggatgggagagtcgccgatagaaccacctcttccctgcctcctgggcttgggggaagcttgaatgacatctaaggccccgtgcctgggtaagccttgtggtgtctcagacatgcccagtgggtgccatggctgactcaaggtggcacagtccccattgggagttggcacagtccccattgggagttggcacagccaaggccctggggccacctggagcggcagtgaggtggaaaggtgagtgggcccttgggcgtcgctgcagggtcgatggcggacgccttgggagagctccagctcttctgcccggaggagacagccccaggacgggggtggcgcgggtctttggtgggggcaggcaggaagtgccagtgctgagactgaatttcaggcccttctcatctgccaataagagacagccccagaatgggggtggcgcgggtttgtcgggggtaagtaagtggggccagtgctgagactggagcttcagggccttcaccttcatctgtgggcctctcgttagttcgtgagtgcaggctcattgggaggcttctgtctgtgtccccccacccccgccccaggctgtaattcagaggccgtgtggcataggcttctagtttactgtgcatcatttcagatgtagacttctacattctttttcctgattataaaatactcgcaaaagctgtaggaaagcgagcctgtgtcccacttggcagcagtgcaggtgagcgtggtgccgtcaccactggcctgtcccaggaactcatcgcccgccacgcatgaggtcagcgtgcggctctgtggcacggtcctctccccatggcaaggattgggatcatctttcatgtctgcagacagcatgggcgaggctgactcgccattgctgtgagctttgtatgccgtcacgtgcacaaggacgtttgcgtcagctgcttctgtggtttgaattaagacctcagcttggcttggatgggggcatttctaaggcgagcgctgtcttgatcctgaatgttttctcattgaatcgcaggaagctcttcgtgggcggtcttgactggagcacgacccaaggtaggtggggaaggggtgtcaggtgggtactgcagatgggctctaggacctcggccttcaagttgtgtctgcccgcctcttgctactgtcttggatattttaaagtccttttgacgttgttctgatttctgggcaggggacagagtaagtgtgtatttgctctgagactgttaatttggtatttccatcccaagttacagggaagacctcaggctgcaggttcctagctccgggctgaggtggcttgtggaggcagacagctgttgtctggaagtgcagagggctgggggctggccaggctgttactgagttcagaataggaggaaagagtgtgtagcaaagtcggcgctccttggccactgccagcattcagagttgtcttgtttgccttgccttaaacgttgccttcctggacgcctacaaagtcaggttgtaaccgctggccactgctgtgctcactggcagcccctgatttacgtgaggacctcaagtgtgtgttgggcagaattccccagcgcttcccgtacaccccccacccccagtgcagcatcgctcggtgcgtggctggtggactggaggagtgtgcgtgccggcagcactgccaggcacgtgcctaatgctctggccctgtgtgtttgtgttttcttcccgatttctgagcagagactctgcgcagctacttttcccaatatggagaagtcgtagattgtgttatcatgaaagataaaaccaccaaccagtctcgaggctttgggtttgtcaaatttaaagacccaaactgtgtggggacggtgctggccagcagaccgcacacgctagatggccgaaacgtaagtgcccttccgggagctcacacccgctctctgtctcccctgtccttcctctgcttcattttttcctggactctgaccgatgtttgcgttagagtatgtttgaacgtggggtcgattgggaaggattaagccttggtgctgaggctggatattgcaggaggatacagggtgaatggagccggcggggcggggcgggccgggctgctgtgccgtggctgctgttgtgctgacaccctctttcctagagaaacagcctcttattcacaaccagctgatttgaaatttcctgcagatcgaccccaagccatgcacaccccgggggatgcagccggagagaacacggccgaaggaaggatgggtaaggggctgggccgggcggcctccttgtgtgttctccactccacgtggaaaggaaatgcgtgccttcaatctgctgttgtcgctcgttaagattgagggcgacgcaggtcttctgggttggcactcgagcagctgaggatcacccagatttatcagtgccgtgagtgttttacagccaagaaaattcttactaatctatcttagggaaaaaaaaaatgacagctcatgccactgattatcaggagccagtcagcttccctctgtgccctgtgtgccctctgtgccgggcctgccccctcccactgcctggccctcctcagaggtgggccatccttccactgccggggctgggccgggctgtgtcagctcgtgctggccactttactgctccacttgagatcccctgacgtggcaacttgggttctctgacctgcgccctggtgcttgcctggccgacagggcactgtcctggcatggggtctccttggcatttgggtctcaccaccacccacacctcaccttcctccagccctgcagttctcacaccggcaccaggagcctggtggggcggtgcagatgggaaagctcttagccccatagaacgtgctggacagtgcagacctggaggcctgctgaggcaccgggtgccagcctctccacagtgtgggcagcagggtggggtctatatgtatttacatccatctctgtccacatacaccattcctaaggaccggagggtgcgtctcctaaaatgacggccacccctcgcatgcacccaccgtcagcacgctggaaagcggctgcagggaatcccgtgtcatctgtgtccaggccgtgttcccagctccagaattgtttcacaagtgtctctcatagctggtttttttcagactggaatccaaggttcatattccatctggttattaatgtctctctagcttttcttaagatataatgggcacgtagtaaactgcaccacttgatgattctgacccatacaaacactcatgaaaccatcccgaccgtcacggcagcgagcactcaccccacgcacacactcatgaaaccatcccaaccgtcacggcagcgagcactcaccccacgcacacactcgtgaaaccatcccgaccgtcacggcagcgagcactcaccccacgcacacactcatgaaaccatcccgatcgtcaacggcagcgagcactcaccccacgcgcacactcatgaaaccatccctacagtcacggcggcgagcactcaccccacgcgcacactcatgaaaccatccctacagtcacggcggcgagcactcaccccacgcgcacactcatgaaaccatccctacagtcacggcagcgagcactcaccccacgcgcacactcatgaaaccatcccgaacgtcacggcggcgagcactcaccccacgcgcacactcatgaaaccaccccgaacgtcacggcggcgagcactcaccccacgcgcacactcatgaaaccaccccgaacgtcacggcggcgagcactcaccccacgcgcacactcatgaaaccaccccgaacgtcacggcggcgagcactcaccccacgcgcacactcatgaaaccaccccgaacgtcacggcggcgagcactcaccccacgcgcacactcatgaaaccatcccgaccgtcacggcggcgagcactcaccctcaaaggtttatagtcttttattcaaagcagttggaacaacttaaaatgtgatagccttggatagggaaaaaaaaaaaaaaggatggttggtgggtgggggcaggaggagagcagccccagccctaagggcagcccgggagctggaccagagactcctggctctggccacccagtgagcgccgaggccccgggaagtggtgcccaggagcaggcgcccttgccagtgggaggccggcagaaggggctgtgtggtttgggccagtgtttcacacagctcttgagctgctggaggtttccgtagccatcattgtcacctgctggagatgtacagcctgaaatccagcttcctctctgctcatttcgtcgtcgctgctgcctttcccctgccgtcctaaagtccctgccttcacactggagcacttttccacgtggcagtggttgtaattcggaatagctgaggcaaggcacgcactgtgtcgtgggtccgtttagctgaaatgtagctctgcagaaatgctcaatccctgtctccttgggtctctctagaaaagtgagaaagtgtctcagcagagcccagtgtctttggacttagcgggcttgtggagtgttctgctctggctttcagctgactctttaaaccagcgcggattggcctttatgtcctccgcagctcgcgggagggtttggagggttcccgtgtgaactaactatccttcccttcttcaacagcagaaaggacccaggagcgataacagtaaatcaaataagatatttgtcggtggaattcctcacaattgtggtgagacagagctcagggaatacttcaagaagttcggagtggtgagtttctccccaccccggcagcactgtggggacagagccgcttctgctcaggcctgggccttcttggggctggagtggccgagccacaggtgcacgggcctttcaggctgggagctcgctgtctcgtatttccccaacgcctgcgccctccggaaaggtggaaagcccggcctttgccttcatggccatttcgtgtcccagtagggtggttgggcggtgaaccagcctgacagccttcagggcggccgcccgattccattgtgaacaccgtggggtccagtgtcagagaagggcagttacacagaaacggggttcagtgtggcctgggcgagccagccccacagagctgactttccactgggcaggtgggagaatgcccgagctccgttgagcccagtgccagagggagctgggacagccggagggggccggcggggagccctcctagtcacccaaggcaggggcgtgtggtcaccccaaggtcctgctgggactcctgccgtgccccgcaggtcacactccgagccccgccagcaggacagccctgcgtgcctgagtactgcgcacgttcatcaggtggtacctgagggtgccacgggcctgggccaggaatgagaggcctgagcggggcctggaagagcagggtctgcagaggagctgtgtgtggctgccccgccacttcgagtgagggccgagcgtgccctttgcttcccgcgtttgggtgggaagggcttctgtggggtctcctggctcccacgtcccctgctaggatgcgtggtcggcgttgttggcccttcatgtccgtcagcacacacgtgagcggggccacgggcagcccggaggcgggtatccagacgcctgccctggagctgcttctccctgcctgcgtctggccctgggagtgttggggctccagcctttctcagacagcagccccacggagcagctgttgcccgtgcacctcccccgctcagggagggcgcaccctgtgcgagagtttgggttcgtgggaacaggctgtgccctcggaagaccacctgtggtgctggccctggtgtccgtgctgacgccaccctctccttccaggtcacggaggtagtcatgatctatgacgccgagaagcagaggccccgaggtaagggcagatctagtttgacctcggccttctccctgctcctccctcagatggcaaactatctcacccgccaggcacacacaggtggcggctgtagcaaacagcctcaggaagggacgatttggagacaaatgactaaaacgtgggctcctcatgtgcaccccattcagcctgtctgtgcttcccgaggtcagacgtcacacattgttttttggcttgttcttttgaagtttttacgacttgtcatgagtctcggcctggcttctgtttttcactgtccggaagagtgtggtccttctgcatttgaccttccttcaccctcatccagtcctcccagtgtggccggtctcatttcgtgtcgtcagctgggtcagctggctcggtgtggagtttggattttccgtgatccatcccatgctttttttttctttctttcttttttccttttcttttctttttcttttttttcagttttctcccctctctgaagtcagcagggcaggtgggaggaggggtgaggagtcacctcagggcctcccctcattttccctcagcttcttgcacacccatccatgctggtttgtggagctgggacgatgggcgcccagtttctgtgccccttttccgtggctgctgctgtctgtcccgcccgcccgcatggttttggttcatcagctgcttttggccggccacgtgagcagacctgcagcctgggtctgcccgccacgtccgtgccgcccccgcaccaccggcccaggtcagtcggggcagccccgagcgccaggtggcgccgcagcatgcccaccatgctggagcatagtttgccatttgaacctccctccccacggttaggagtgctcctcctccatgtcggttacgctgttaagtcttagtcgtaacttaatttagacatacatgcttagtgacgtacttaagtgtttcatagtaaagtacagtgatgttaagtaagctgtttttccttttctctctgtgaattgtgtgtgattaacgatatctctttagatttctcttctccaggtgctaaattatatcacacaggtacaggccagtcccgcagtcagaggagggagcggctttgctccagtggggtgtaaacgaagtttcaggtgtttctgtcccgcttcctcagtggtgatgtcgcctcttgacagccgcattcctagacagcgctcagggcgcctcccccaggacccagcgcctcttgcactgtgcccggaccaggcgagccctgtggtttcagacactcctgcagtttgcgaaaatgtctacttctaaatacgttgtttcatcaccgatgctgtgttccaatactgcctctgatcttgggaaacttgagcgcgcgggaatctgagggttgcttctagatcctcccggtccccctccggctgcccagagctggcgccccttctcctcgcgtcctgtcctgtcccgtgtggacgggacgtggcgagtgtcgctgagtccacactggtgtacagagcacttcggggccagcacgtggccacatgtccttagctgttgggctttgaaagtgtcccttgggtgtcaggcgagtggagggccggagagacgctgcggcgctgcttagcgggtcctcccagagagtgtgtccccttcccttggcctttctgcatcttctgagacgggtctgtgtccccctccccgccacctcctccctcttcctctccactgactgaaggtcatggccatgtccctgtcagggaccccgcctgtgtctcgggcacacagtgtctgtgcgggtccctgcttggccctcccacgtctaccctcggcccgcccgctccagccgctgcctcgttcgcctctcagtcccctcaggtcttctccatcctgcgctcctctcgctgtgtgccttgccttcctggtccctcctcctcttcctcctcctcttccccctccccctcctcctccccctccccctcccccctccccctccgtctggttgcagacactgcgtgcacagtcacgctcaggtgcacacgtgtgctcaggacggtgggaggctcctgaaccacagtgacctttgtcccctcacagtctgagctgccctttctgccccgtttccatctttccccgcccccagttttgcttgtcctgtttctgcctggtcccagctacagcagccctggcccctgtctcttcagcttgagaggccccacagtaggctgctccttccgggggccgttgcctgttcccaccccccacggcccttctctgccgcgctcgttcacgcctcacgcccgtgctgcgctgtcccctgctgtgtggtgccttgtcacgcaccctgtgcctctggcgcgggcagcccatcttcagcccggtctcagctcttcccatgtccatctttgttctgtgaggtcttgggcagctgtctgccgggcacttccatctggggaggggctggtgccgcctgggccccgcctcgggaggacggtgtgctttgcggtgtcacgctccacctagccggggaggcctggagagcccggcgcactcctgcgcctagaggaggagacccgccccgttagccgggggccgcgcccaccccagacccactaaacttcgtttatactgccactcttgtgtttgggaaatgctaaattttttttgcctttaaaattttctgttttgatcccatggtgcatctcgctcttgctgctggcagcagagtctgacctgctggaacccgttgtggcctgtatctttgtgcattgtttctctacctgtatagaacatgcatagatgtctacgatatgacctcttctaggactccttgggcttacccaacggtgttgcgtaagcctagcgaggcaccagctatgatagatactgtatctgttaacgctttagaacgatatatggctgctgtcagcactagctgcaaagcaaattgcaagccaagggggagaatcctgggtttcagagaagcatacacacatccacggtgcacacccctgactaagatggcgcattccacgcgggcccccggcctgcagggttcactggcaatctccccacaggcgagagccagaatattcaagcacgggcctctgaccctcccctggggggcgctttgtctgccagtagcgatggaggccctcaccgttcccctgtctccgctgctgttttataagatgtgctccttgttccaaatctttgtgacacggagccccagcccggggtgtctggggcggaggcttgactcaggcctcagtcagcagagccgtcaccgggagtgcggacgtcaccgtctgtccactccgtgtgcagtcgagtggtggctcctggggagggaggcagctgccccaggggcccgcagcgccccacacacagcttagctgaaacccaaggtcgatccctcggcccgtccctaatactgttcatcatcctgttttgtgtcacaacaccctgctaccttgattcactcttcgtcgttggctaggttttggatttattactttcgaggacgaacaatcagtggaccaggctgtcaacatgcattttcacgacatcatgggcaaaaaagtgtgtagttgtagttttattttaccttaagaccaaaccaagtcttaggcaacttaggggtttcactggaaaggaacattccttcacggaaagggtcgggcgagttcgtcctgtgaacctttgctgcgtgaggtgggcctgggtctgtagacgtgaggagggtcccatccttccccagcacccttcctgcggggtggggatctctcagctttgctcctggagcccctccctctgggtgacctgggactgggcgggtagggggctggggctgggaggctgtggcggtgttggggctggctccagtgaaaccgcagcgttgcctcaggcttggtttccacgaccactccttcagatgtctgcaaatccccattgtctgacactgacctgtaatgtgatcagcaagggacctttgagagccgaggttccgcttaaaatggaaagcacagtggaaacatcatgaaggactggttgtttgaattgggtcacttactgtggaactccggcaccagccacatgctctcggtagtactcagccaccatgcagtcaagtgacctctggttgtgtcatcttcatactgtgttacccccggaggtgagagggacaggaggccacccccccaacccccaggccagcccttggaaggcatgtgtcagaaaggggtccctaaatccttgttttacctggacccttggaggttcttgagaagtggactctgaaataaataactggtagaaattctacagtgtggaatttcttgcagttagcaaaagcttaggggtccaggtttttgcaggattcctgtcttggtcctttcaaaccaaggagctctgctggctctgccaggccgcctcacatgcccagtgggattctgacccggcctccttggtgcggcagcttctcccgttaacggaagaagacgcttagcccctctgacagggccatggttgttttttcaattaaaatgtcctggagggagcatcgtgctcattatctcctgcccctgccctctaccccagccagaggtcttgatagcagaacttttttaaaaacagtagcatgtgtagttatttttgtatacacgtggcttagattgggttgcagacttcattaattccatttgaacccaactaaaacaggagacacaatccttgttctgacatcgagtgcagcttgtggtttaaaatgagcctgccggctgcatgggtgcgcgacagtacaagcagggcttcaaggagtctgcgcccagtgttttaagggactacgacactgacaatttggggaaagcgtggtcttgatatacggggcagaaagagctctgtacagtgcacacacctgctgccgtccctgggcagcccctgggtccccccagccatgactgttctgcgcgagctcctgagctgggcgacctcagtgtgggtctcgccttccaagccagacagtcgttggagtccagcttgcccggcgccggccttcactggttggctggagcggcacttggcgtcgccgccggcccctcatgggggttttccgtttgtggagtgtttggtaccgcgtggtagttaaccctccatgccaggcgactgcattgctgcattcaggtaggaaagggtgaaagaatttttttttgtttttgtttttttaaagtacaaggaccgctctgctttgtaagcaggaaccgcagtcccctgaggagggtgtgtgaagactcgctcatttgagttctttgaaatgggtcccttggtcctgctgtcacattgccttgagctaacggatcctgttcccatcataggccggtccttggggcattgggcaggtgggggctttgtgcctctgtggctgctgctgtctgttctctaacaggcagaactgagggattctgaactcaggatgtgcagctctccagactgagaccccaaggctgactccaggtggatccattgtctctttattctcattacgatttatcagaaaagtgagacaaattcaggattctcaaatgctgaggcagccccggaattggggggatctttctgttgttagtccacccatattttcaagcaggcattaaaggaaggtcagccactgcgcctagaataagtaggtcaggcctgctccatccattgtccccggccccgcaccctcctcctgagaagactgtggctcctgacacgtctagagaggaagggccccgggctgctgagcgaacacagtatgaagattgcttactgatccaaatgtccattttattgcatgtttgttactttttttgttagatgtaatgtaagattctcttatcacatccattccctctgacattagttttgagttaattgagattctttaagcgttagcctggggaaggtaagtctttatcttccattagacattttaaatttaaaaatctaagtaaaacaccagccgtgtttctcaggtatgagttaaaagcacaggtgggcgggctccaagcagtccagagggcgatgaggatgccgattgctgggaagatcctggtccctttttgtccccatgttttcaagaggaaggaggacgctgccattttacttgagtgaaagacccttcgtcacgcacgaaacccccgagggctctgggctcggtcctgctgccccgcagtgggcgggctctgtgtgtcttacggttgcatctgttgtacctgagaaacattttttaaacaaaaaaattcaacacaaaagaattttttaagaaaaaaatgctactggcctaaataaggtttatagttaagtatttagtcttaagttgtaagatgctaagtgtagtcataagttacccgagggtgtgtctaaagggaagggggtgctgggacccgcagcctcgccctaaaccagagctcggtttgtttaggtggaagttaaacgagctgagcctcgggacagcaagagccaagcgccgggacagccaggtgccagccagtgggggagccgggttgtgcccaacgctgccaatggctgggcaggccagcccccgcccacgtggcagcaaggatatggcccgcaaggtaaggctgatgcagaggtgcccacgggaatgtcccccttctcggacttggcccgcgcgccctgggctgtgccgtcgctgcggcctccccacctctgctgtgcatgcacagagccgcggttcacagtgtccttgagcccccgcgaggtgccggctgacagccagctcccgggcagcacccgcagcctcctcagtagcggggtggccacggcttaggtgcccgtccggggcctgggactcattgtcaccgggaagagctgcagtgagcgtctgcacctcgcgaccgtgtgccacggcaggtctgagcacgaaaccctgagagggctggcattgccaagctgagctcagaatcggggtgctgcccctggggggcttgaggagccggcaggctttggatccttgccacctgccgttccctctgcagtgccgtgggccctctgtagttaggcccacgttgtgggccgtccttggagcttccagcagccacggaacccctgggcttggctgcagcccgacccgagttgtgggtcagggttccagatgtacgtcgtccgggtcccgagactgtggcttccctgcacctcgtctaaaacctttttctctggagcctcccttgttggaaactcggaggtgctgtggggactgtccctgccctctcgaggcttagaagtctcaggtttctctggggtcctcaggtggagccgggaggtcacccgtgccccagtcagcagacacagtgcccgccacctggcagggcacagaggagagtggctttaaggcctgttctacaaggggtggggagtgcttctctgctcagggttcagagggctctgccctcaggacgaacaggctctaagcacaggaggctccggggttggtcccagcccttgacgtccatgctctgcggctccttctctgcgtcggacagctggtggacacggcgccaacctcctcttctgttctcttatctaggaatgtgggtgccggcaggacaggcgattggtaagtccttgtttatagagcaaaggcggggacagaagccacatggcaggctgactcgccaggtgtcctggggcagccggcaaagcctggttcccgtgtcctgagtgctggagaggaagagagggtgaggggcctgctagggcccctggcaggcctgggtctaactgtggccagtctgtgttgtccagcgctctctgtccatcacccccgtactgtgtgtttcaggtggctatggaccgccccctgcaggaagaggagcccccccgccacccccaccgttcacctcctacatcgtgtccacccctcctggaggctttccccctccccagggcttccctcagggctacggtgccccgccacagttcagtaagtctagggggccttgtgggagggcctcccgcctgctccggagatgccaggtggtgggcggggtgatggggagtcttgtgttacacgtctggcctcagccacaggtggggtgccggctggtcagcaggtcacctgccaccaggcccttcacctgcagatgggctccatcgcctgtggcctcgctggttaggctaaagggcagcccgggctcctgcgggttggagagctcatagcaggaatgtctgggcccaaccagttctcacaggctcctcaggagacagagcctggacttcgtgtcttagcctcatacttcaggattaggggggcatttgtttaagggtgtacaagctctaattgttttttttttttttttgagatggagtttcactctgtagcccaggctggagtgcagtggcgcaatcgcggctcactgcaagctccgcctcctgggttcacaccattctcctgcctc[218 bp omitted]acgtcacttgtaattgaaaagctgagtgtaagatcagccgacacacccagagttttattttattttatttatttatttatggtttttttttgagatggagtctcactctgtcgcccaggctagagtgcagtggcgccatctcggcttactgcaagctccacctcctgggttcacgccattctcctacctcagtctcctgagtagctgggactacaggcgcccaccaccacgcc[131 bp omitted]cgcccggactattttatttatttttttgagatggagtttcacttttgttgcccaggattgagtgcagtgccccgatcttggctcactacaacctctgcctcctgggttcaagcgactctcctgcctcagtgtcctgagtagctgggattacaggcgtctgccaccacgcccggctaattttgtatttttagtagagaacaggtttcactatgttggtcaggctggtcttgaactcctgacctcagcgcatccagaattttagacggggcccccagggtgaggtcttggcaccctccagtagagaagaagggacatgggccatacgtggggtgtcctttctgggagccttgcgtcccttacctgcctagccagggattgcacctcacagcacgcagccagcaggaacggcaccgtgatctgatttcacctgcgggccctgggccctgggggtgtttgacaattggggcatatcacagtgtgagctagtcccgtctcgggggtttggaggctccacgtggccgtggtacaggagcaggcagttccatcctctggcctggatcaggctctgcacacggaggcctgtgggccagatgactgacaggaggggagttgggtggaacctcggcctgcctgatatccagcaacagagggcaagggcggcagcacctccagcatgacagtcccttccaagcacgtcaggatgctcccttgcctgtgctggcagcttcctaaacatggggactgggcatggtggcaggtttttgtccttctgaaagagcaattttgctgtgaggttacttgctccttgagttcttgtctgaggcccacctggcggctgctccgtgaggaacgaggtggccctgctgcagctcagcatcccgccacgctcccaggagtgtgtgtttcctggggggagcggcccgggaccgtggctctgtggtccattctgtggatgtccacaaggcctgggcgttctgtgggtttgggtggcagtcccgtctgggcagctcctgctgggctgggtgtgggtctcctgctggtctgcccccagctgcacaacgtgtcttgtgccttgccctcttgtacctctgcaggttttggctacgggcctccacctccaccgccagatcagtttgcccctccgggggttcctcctccaccagccactcccggggcagcacctctggctttcccaccgcctccgtctcaggctgccccggacatgagcaagcccccgacagctcagccagacttcccctatggtcagtatggtaagtggtctcctgccatgccgcgtccccgctggccccaggaccctgggcacggcctgccttcttctgcttcctcccctgctggacgctccccagcctttacctggtgggaaaggggagagggaggagaggggggtgtgggggttgttggagagatctcgtggcaactcgggtccagcagaagggagcgtgggagtcttgtcgcagcagagcactcgtcatacagcaggtgctgcagggcctgcatgtgtgggaacctgagtggcgactgggtcgagggaagtgagtcgcaggcagctgtgatcactgtctagaggttcaggccctcggtgtgggtcccgggtgcactggccccttggtgggttccagtttctggcgtcatcagcctcctgctgggtccagaccccgcttggggcagaagctgggtctgtagtaggcgtggcctggacgtgggcttcaccctggactggatggctgtcgtggcttgggtctgcctggacgtgatctgcaggcagcgcatgtgcttccggggcaggagcttgtgggggggcggggtcagcatgggtcaaggtctgcatgtcagtagttctcgccctgcactgagccaggagtcacagcagccttgctcaggaccaacgcggtggcctcagtgggcagggctccaactacggtcagctcctccagcaccaggggtcattcacaagcagggtttgagaacatggggcacctgtctgcaggtggccacgggcttccggggtgcctgtgaacacgcttcctctaggcctggtggaggccggggtgtgggagctgtgttcggccgaggtgcccgcccacccacctcgcatggctgtggttcccctgcccccacgcccaggccttgggccgaggttgccgcatgtgtgggttcttgacccactcaccaccaaaccctggcgtgtctgagactggcaggggggtgtgaggcgcccggttggggcgtggcgtgtgtcagccgctgctcttggtggcggctgcttgggttggtcaccctggtctcgtctcttgccaggcctgggttcctattctccagccccgccgggctgcggcccacactttgtttacagtcttatggtcaggctgagcagtgatgtggcctaggtaggtgccgcctccttctccagggtcctcccacccgcctgcaccgggaggtggacgtggcttcctctgccgtcccgggcgggggtggacgctggcggtgccctctgggaaggggcccttgccggtgccaagacattggccacaagccttcagcgggcccaggatcccccagagagagcccacgcccacctgtgcccacgtgcacccgaatgggaacccagaggtcgtgggaggggcttcctgcaaggtgtgcagcggggtggggagcggcgtgagcagctctgtccttgtaaagacaccgctgtccatgctcctgaggtcggctgtgtgggccggacgggctgcagggtgtgctggcccctcagccagtggtgtcactggggcagtcaggttgggcccagaaacccttccctgacacgtgccaccgatggacgtgccctgacaggaaggacaacgtggggtctggtctgcgacggaggggcaggccctgtatcgctgcaagggcccgtcaggggttttctgaaactccgagagccagctttctagaagcctggtccaccgtgccttgggccatgtgtgtctccaagccccgaggcttctctacctcccctcacccccccaaccacgtcttcgggattgaacagggaagcggtgaggttacgtgggccatggagggctctggaagccgcttttctctgtgtgtgcccctgctcacatgtttttgagggagagaacatgcccggggtcctctccccggcccaggtgctggcctcagaagggccccacccgcaccccgtgggacccgtggactcaaggcaggctcggcggagctgtgtccaggtggcctcgctcgacggcagtgccaaccgcccagggaccgccccgagctcacaggactttctcccccagcaggttacgggcaggacttgagtggcttcggacagggcttctcagaccccagccagcagcctccttcctacgggggtccctccgtgccagggtcggggggcccccccgccggcggcagcggctttggacgagggcagaaccacaacgtgcaagggttccacccctaccgacgctagcccgcggcgccgcgacgtctgcacggcccagacccaggattccaaacttgtgaactcgtgacaatcacaaacttggcggcaaagtggcgactcaaccttgggggggggggcggggggagggcgcgaggcttttggagcggctgtgggtgtcgtctggactgaggtttttaaatatttctttctctaacccatcagcacaataaaaaaaagtcactggttcaacaacagggtttaaaaaaaatgtcttcagctttaattcaaaacttcaggtttctttttcttccttttttttggaaattattttcctgagccttttgttttacggtatattgtaaacttttatgttaaagaaaaaatatacatttacaaattgtgagatttttaagagaaattttctacgatgtatactggcttattttttaatttaaaacggggtttccgtcggcactggtggagggggtgcgctgttagtcccctcgctcctggctttgggggttgggacttggtggtccagaaactctgggagcttctagaagaaatctactgagtgtatttctgttttttgtttaattccttgcttttgtcgactgacctgcttggtagtgtctgaggtgaactgtgggggttgcgcacagccagccgcgtggatcccacgcagcgctgaaccgaaccgagtaggaagcctttctccccaggcacgtggcttcagggcgtttcccattgaccagtttgaccctggtttgaataaagagaagtgcgtttggattagaaaccactttgtgtccgttttttccctccttggtcttggcctgtgcctacccttccagtgcctaggaaaggtctgaaacgcgacggaggcgccctcgccctccccttggctcttggtggtctcagcaaccccgagggcttcagggcagaggctgagtggcgagctgggcccatccctcagtgggtcttgggatgctgtgactttgaggatgtggccaccaccagttttctcggggaatgtgggctccaggcttttcccatctcaagacctttaatcatatcttttgccatggaaggtgacatatccccaggttctggggattaggacaggggcatctttggaaagggatactctgtcac[134 bp omitted]accccgtctctactaaaaatacaaaaattaaccgggtgtggtggtgcatgcctgtaatcccagctacttgggaggctgaggcagaagaatcgcttgaacctgggaggcggagcttgcagtgagccgagattgcgccattgcactccagcctgggcaacaagagcgaaactccgtctcaaaaaacaaaacaagaaaaaaaaaggaccatgaagtcccaaactggaagcctacagcgtgccaggcgtgagactgttcaggcgacagccagaaccacccccccccgccccagttcatattttggggacagggaaggtttgacttagtttggagagaaccaagagaaggggtacccccaacatccctgtgcagtgcagtttcctcactgagacagtacccctcaacgcctcagcccaggaagccagctccattccctgccgtcagagccttctcccatgtcctcaggagctgctgccccagctcccaggagggccaggcgggggcggctgtctatccacaccacaggtcatcatggtgttgagtgtcagcccctcccgttacattagctcccccagccaaagagcagcactcacaaaatcagctttccagccaggacactctgctgcaggaaaatgggtaacatggacgggcccgacacataggtcctgtgctcctcgggacggagactcagccctccctgagtacagtgtaattggcttcccttgggactgtggggacggctggggagagctcagctccctggacagtgccacagctaagctcgggttcccagaggttttgtgctttttttttttctttttcttttttttttttttttttttttttgagaaggagtctctgtcgcccaggctggagtgcagtggtgcgatctcagctcactgcaacctccgcctcccgggttcaagcggttctcctgcctcagcctcccaaggagctgggattacaggcacccaccaccacgcctggctaattttttgtatttttagtagagttagggttggtcagcttggtcttgaactcttgacctcaggtgatccgcccgcctcggcctcccaaagtgctggaattacaagcataagccaccacgcccagccaggtgccacatccatagttaatagtcaccttcaa[140 bp omitted]ccaacatggagaaaccgtgtctttactaaaaatacaaaattagccgggcacggtaacaggtgcctgtaatcccagctacttgggaggctgaggcaggagaatcgcttgaacccaggaggcagaggttgcagtgagccgagatcacaccactgcactccagccagggcaacaagagtgaaactctgtctcaaaaaaaaaaaaaagtcactcctacatagttctagttactccttctctttgagctatcattattcacattacatttacatatcttaacaaacccagtgatattcctaactttatttttgaggcagggtcttgctctgtcgcccaggctggagtgccgttggcgcgatcacggctcactgcagccttgacctcctgggctgaaggctcagcctcccgagtagctgggaattttttgtactttttattcttttatgtccgtgtgtacacaaatttttgtatttttttgtagagaggcagtctcactgtgttgtccttactaactttatatacaaaattttatctgttaaagccggaatggttcttttcagcgaggccctgtccctgctccagtatctgtaatgaattctcgtgttcctcccacagtgggacctgaaccgccaaaccgcacctacgagcaaacggtaggcgctccataaatacttgttgatgtgggtgccatcgtgtagatgacggagcacgaacccgaggctcagacaggggcggcgacttgtccaaagtcccactccgtggaggaagcggctctgcagacctcaggcggcggctgctctaatccctgcagcctgtgttttgccctccagacggcagagggcgcgtgttcgccgccgggaaagcggaagcgcgtgtgcgcgcacggccgagggggcgggacatgccggcagtctcgcgataactgcgcaggcgcggaccaaagcgatctcttctgaggatccggcaagatggtgagtgttgcgatttggcgcgtctctgccgggcctatccggctccatccaacctctgaccgtctcgcgggggccgcagttcgtccccgcggctacggcggcttgctcccgaccctgcaggcggctggatgttggggcgaggggcggacttggtgggtgtcgggacgacgcggggctgggaaggcctgtccgggccttcatgtccgggtcctcgtaacccggagccgcgagtgatccccggggacgggtcgaagcggtgtgtccctgtcgggcttctgtccccggcggcgccgcgcgtcttccgcggtgtcctcgggcccggtggccccgggagatgggtgtcgggatcccgctgacgcccgatccgcgcccgcacaggcagaagtagagcagaagaagaagcggaccttccgcaagttcacctaccgcggcgtggacctcgaccagctgctggacatgtcctagtaagggcggccgcgggggtcgcgggcaggggctgggccagcggtggggcttgtccgggtgagggcggcggggcgggggtccaagcgcctctgcggcggtgggcgggcacggtctccgcgcgggtttggaactgagtgtggtcttgcgcccagaaaactgtccagagacgttgaggtttttgcttatttgcaacctgccccccgttgttcacttttccgcggcttagttggaaggtgtagcccctgtctgtagcccacgtgacttagaataaggggctgcgttagactccttagattttaagggcggtggaggtcgctgggtcctttccaggcagggtggtggtgggcatctggcttgcgcttttattttttaatttttgattattttgaggcggagtctcatcctgtcgcccaggctggagtgcaatggctccgtcccagctcactgcagcctcccactcccgggttcaagcgattctcttgcctcagcctctcgagtagctgggattagagggcccccccaccacgtccggctaatttttgtatttttagtagagacgagtt[137 bp omitted]tgtgtcgtccaggttggtcttgaactcctgggctcaagcgaccctcccgcctcaacctcccgaagtgctgggatcacaggcgggagccactgcgccctacctgccttcccctgcgtttttagaggcctttggcccgagctgtacgctgcagcaccttgtctgaggctgtggtctccgggccgcttgttctctctgaatctctgcagtcacacggtggctcttgcatgtgaggggtgagtcgcgcatatctggcgggggtgccagagggacttggcgtgttcattgtagtcactacaatggacagtgacaggtccactgcggctctgtccctggagagaaccaagccttagttctctgtccgccggagtgcgtagggtctccccaggccgggccgctcacaaaactgcctggtgcatcctccccagcgagcagctgatgcagctgtacagtgcgcgccagcggcggcggctgaaccggggcctgcggcggaagcagcactccctgctgaagcgcctgcgcaaggccaagaaggaggcgccgcccatggagaagccggaagtggtgaagacgcacctgcgggacatgatcatcctacccgagatggtgggcagcatggtgggcgtctacaacggcaagaccttcaaccaggtggagatcaaggtgtgtgcggccgtccctgccggctggggtgggctggggtcgcctgatgcaggcgggatcagctgacacccagctttgctcttggtctcccgcagcccgagatgatcggccactacctgggcgagttctccatcacctacaagcccgtaaagcatggccggcccggcatcggggccacccactcctcccgcttcatccctctcaagtaatggctcagctaataaaggcgcacatgactccagtcctttgcgcagcttgttcttcctggcgtcccgagctctgggaggggcctgggcctgcttcaggttcgtggtgtgaggaggttcaggttggacgttcgggggtgtgtggtagtgttgtgtggatggtctcttggtgtcgaagactgacagctgtgcgggccctgccccaactcggctgcccctgctcctgtctgcagggacagctgtggagctgggtgcccaagcccaggtgtgtagctccgtcccttttggccccctcagcgttcttgacctcggggcagctgcctggcctcactctgtcttctgggtacctcacgtagagggggccactcctgggctaagtgcagcccctcaagccctcacctggcctgggctctcctttctggcttccctcatctcctgtggagggttcccgcaggaagtgaagcagcagcaggaacctttgggccacctgagcccctcccttctatcctcacccctgcttggcttcttagaagctcctgactctcctcctgacaccacgctgctggcatctcctctcccagcaggctccatggctgcagccagccccatccgcccagcctggggctttgtgtccgggacagagccgtgtcccgtggttaggctgcaccatccgtggcctggccagctctgtctcctttgcacagaatgcttgaaagaacaggacaaagtggctgtgcctgtgggtggggggcaccgtccagccctccatgggctctctgatggccgtacgtgggttggagaacatggtgagaactaaccccgttcaatgctggagtcacctcagcccagaaggtggtaactttgctcactaagcacccagcagagtggcccagggatgtggggtgggcctccccttgggcagtggacaggagggtgagagctcagccaggcagatgggggcaggggagatgtgaggagccccaccttcaccctcaaatggcccacaacagcctcctgtgggccctcttctataatgtttctccacttttttttttaaatttgttgcccagccggagtgcagtggtgtgatcatggctcactgcagcctaaatctcatgggctcaggtgatcttcccactgcttcccaaagtgctgggatcacaggcatgagacactgcagctggctatatcttcaaatttaaacatgatttgcagccaggcgcggtggttcacgtctgtgatcctagcactttgggaggccgagatgggtggatcacctgaggtcaggagttcgagaccagcctgaccaacgtggtaaaaccttgtctctactgaaaatacaaaaaaattagcctaactgggcatggtggcatgcggctataatctcagctacttgagaggctgaagcaggagagtcacttgaacccaggaggcggaaatcgcactctagcccgggcaacaagagctagactctgcctcaaaaaaaaaaaaaaaaaaaaaccatgatttgctcgtgttcttacctctcgatttggaattaagttacattacagagaaagtgtgggtccgtgtttttctctctgtttgggaaaaggtgggttggacagaggaaggatggcccagggttataagcttggctccagtacagccgggagacccccaggcagcatgagtcggtgggactggacctgcctggctggtgtccagaggggcccgtagccagtgggacggtgctgcacgtggtcgtgcctcaagccctccactgcaccgggcgccctggccaaccctgccaggaagtaaggagaccggggaggccactgagggcctggacctggctgggtagtcagaagtgggggcaagtcttggctggcagcccctgagatgtgtagaatgtttgaaaattcgcctgtgggttgacctgaacccaccgggcttgaaaccaacggtccaaagtttggagtgtggtcttaaggaaggagaccactactactcctgctgccttcctcccaccaccttgcctagttcacaagacaggaggagagaaaatgcaaaaagttggaaaaaaaatgcaaaagtaagataaacagacaaccttggcaccaccacccggccctaggagttaaaaaaaaagtaataataacatcaaccactgacctaaactacttgtgttatctgtaaattccagacactacgaaaaagcattgtaaaactttctgttgtgttagctgatgcatgcagcccccactcacgttttccacacttgcttgatgtatcacgaccctttcacgtggaccccttaaagttgtaagcctttaaaaaggccaagaatctctttttcggggagcttaagacgcgagtctgctgatgctgccggccgaataaaaacctcttctttaatccagtgtcaggagttttgtctgtggctcatcctgctacagtctggctgctaggtggccgccggaggtctctgggcagcactggccaggttcacttcagcgtgaacagcagaagcttgtacgggacccagcttcgaaggcccaccccaggtccagctcaaggagagggagggaaggcatgtg[134 bp omitted]ttaaagcaattctcctgcctcagcctcccgagtagctgggattacagaagcacgccaccacgcctggttaatttttgtatttttagtcgagacaggatttcaccatgttggccaggctggtctccaattcccaacctcaggtgatccgccttcctcggcctctgaaagtgctgtgctccagcctgggcgacggagactccgcctcaaaaaaaaaaaaaaaaaaaaaagaaattgctgaggtgttaggtgcttttcgcctcagataagcaaagtgggaaattagtggatgtcccactgaaacagctttatctgcaacatggttttcaaccctgagccttagaaatcaaaagtgccggaaaccatggtgcaca[148 bp omitted]cccatctctactaaaaacacacacaaaaaatcagctgggcgtggtggcgggcgcctgtagtcccagctactggagaggctgaggcgggagaatggcgtgaacccgggaggcggagcttgcagtgagccgagatcgcgccactgcactccagcctgggggacagagcgagactccgtctcaaaaaaagaaaaaaataaataaatggaaatgacagagcttttgagctaccaggtctatctgcagagcaaatgacacagagatgtgtggggccgcgcccatcatgaggcagctagctgggaacaagccccagggggccctccctgaggaaagcataataggaatgggtgctgggcctcacttcgcttttgcagagctttactggcacccagctgtgcccattcatacctgtattacttctgccaggcagacgctgaaaatttactgtctggacctttacgggaagtttcctgtccataaaagccctccctgcacacgcccctgctggctagcacgtggctgctaatgggtacttcccttggttttctgcagttggaatccagcatgtgtgatcagggaaaatatgtattagtatttaaagcaaaaagatacccccagttcagagagacacatgtcttggtggccaggtggtgccctaggtccacaagaatttggggggtgtccaggaggtggggtgggagcctctaactagcactagggtgccactgtcgagggccactcccaactcaaggcccaggctctgtctttaggcctctctggccatatccgcacttcttttttttttttttttttttttttctgagacggagtctagctctgccgcccaggctggagtgcactggcagaatctcagctcattgcaacctccgcctcctgggttcaagcgattctgctcagcctcccgactagctgagactacaggcatgcgccaagacgccggttaattttttgtatttttagtatagacggggttttgccatgttggccaggctggtctcgaactcctgacctcaagtgatccacccgcttcggcctcccaaaatgctgggattacaggcgggagccaccgtgcccggccccacgcttctgtttctaccctctggtcccacaccccgctccagaatctgcatggactctcccagacctgcccggccccatctgtgccgtctcagacagacagctccgtcctcatcaggttcaggtctggccccggcgcttgcgggtcagctgccttcaggccctgtcctggttcccggcgcttctcacatccccgcggcctcccccctggacggcagtttacactgaactcggcgccctcccctgacttctgaaggaggagtcctgggtggccccgaagcctccccggcagccgcacggctccgtccccgctccagggttcagctgaggcacctgctggaggcggcctgtccccgccgccctgctaaagcggcgcccctttctccggccgctcgttctttggtttccagggactttgcacaattcataacacccctcttagcccccatcctgcccgggccgcatcttccgcccgatcatccggccctcgacccgcgcagccgcctccgccctcctctcccggcaccgcccacggcctgttctccccgcagccgccagcgggcgcccgcgagcctggagccgggcgcggccctgctctgtccacagcccgcggtggctcccacctcccgctgggcctgcgcgacctgccccccggggcctcccagccctcactgccctcgcgggctgcactctcccccaacactccccagggctgttcggcctccccagcagctccccatgccctgcccgccgcgctggcgtctctcccagcccgctgcagtcccctcgttcacgtcagcttcccaagggcctggattttgttttgttcagtgcagggggacccagcacacagtaggtgctttataaatgcttgttgcatgaatgtccgcgttcggtgtcgcccccttacggcggccccccgcgcgcccagctcggcgcccagcaagccttgtgcgcgcaggtgatgtttgctgaatgactaatgaacctcagcgcgccaagccgggctgattcgggggtggttccgagcttccgcagggtgaccgtccgcgggcagcggaccacagccgcatggcgacgccgcctctggccccccgcgacccccattccccgtgggacctctcgtgcccccacccccacccggcctcctccccgccgcctcgggcccccccagcctcctccgcattcgaactccccagcgtggtcggacccggaccctggcgccgctcggcccacgcgagtcccctcccctctctcccatccttggatctcccaccgcccctccgcagcctcggtcccgcgagactccccagcccccgcgagcacccccagaccccacggtacgccctcgcccctttcgggaggagccccgccccgggcccgcggactgacccctcccgcccctctccgcgcaggcgcagggcggccccgttcgcgtcccgcacccccaccctggccgccgaggggcggggcgcggcgggtccggggcggccgcggctccatggggctcctggggctcctgagcctgctgcactcggccttcttcggggaccaggtagggcgcgtgggtcgagccgttggggagggctccgggccgcgcaggaacggggcggggtccacaccgcgggaacagcgggcgcggcggcggggggcgcatggggcgagcgcgcggaggctgcagagtcgggggtctagtgccgtcgccgtagagaccgttgccgggaaaccgcctcggaaggctggcggggatggaagcccctctcgtgcgccgctgcgacccccagccccgggtctgcgcaagcgcagggctcgcccagcccagccctcggcctctgcaggagaccctcggacccctcctcactgcgccgacgcggaggctgcgccagctggggcggcgggggcggctgcgggggcatcctgcggaggctcggccctgcgcagggtgggggcctgggccacgccctgcgcttctttgggcctcagtttccccttctgggcgcgagcgtatggcctgctttgacgttcgccgccgctgctgttcgtatccgtccgctcccgaccccagcgcttctccagcctccggaatcgtctgaatttcgcggctgtgacatccctcattggaggggaaactgaggctggggggtgcagcggggagcccaaggtcacgcttcgaggccggagcctcgttgcggagctaaggcgcccgcaagagaacgcggggcgggggccggggagctgtccgcggtgctgacggaggcgcacgtctgccgactcgccgccggggaaactgaggcccatagcggcggtcaggcttcagggcgcggcctggaccggcctaccccaccctcccccacctccggtggcctcctcaccggtcagggctctgcccggccacccagccggcggcgggccgtctctatcctcccgcgatgacctggtgccttctctgtccccacccagctcccgatgggggccgcccctgtttctgcctctagcccctggcacagaggaggcatcaagggggcggggacagctcgaggtcagactcagaaggctcaaagacactccaagagtgagccgtgtgccaggctgcggacttgcggggaggtgtcacaggacaggggtgggggagtgagcatttcatggaacttcccctttagcccagcagcagtagggggcgtggaggaccccagggaggagcctaggtcggggtcttgggctaggccctgcgttctgcagtgggagaagggggagacctctctcagtctcctgaagtcctagggggctgtggggggttcttgaggctctgaaatgtctggtgatgtctgagtgtggctgtggttcaaggatttacagggtcgaggattttagtgtgtggggggggattgttcagggacataatgttttgtagatttggggccaagggcatcttgtcttggggtctcagcccccatgtaccctcagccctccaggccctggccacccccagagggataagaagggaggttcagtgtcactccggaggcctggctggcacaggtgaactcaggcaacacgttccctggcccaggcctcagtttccccatgtatacaaggacaggactgaccttggatcccccaaacccctgcctgatgggggcctggggagctgagacatctgaaactacacagggaggtgggacttagttcctctttgggggaggcagggatcatccaacccacccttcagtaaacaagactggaaaccgaggccagagagagacatgcccagggggacacagggacaacaaggctgagctgaagccagggccctgggctctgcatccccaaccccatttcagcctcgcccagctctgccccggcttgacctgtcaaaccccaccacgcgccctaccccatggctccaccagacaccccctgtgtcccaagcatgcattgatcttccctcagcctggaacgcctctcctcctgatcactgctgttcacttctcagggcagccttccagcctccagaaaaaaatccccttcgaggcgggcggatcatgaggtcaggagtttgagaccagcccgaccaacacggtgaaaccccctctctattaaaaatacaaaaattagctggcaaggtggtacatgcctgtaatcccagttactgaggagtctgaggcaggagaatcacttgaacccaggaggcggaggttgcggtgagccgagatggcgccactgcactgcagcctgggggacag[179 bp omitted]tggcgggcgcctgtagtcccagctactcgggaggctgaggcaggagaatggcgtgaacctgggaggcggagcttgcagtgagccgagaacgtgccactgcactccagcctgggctacagagcaagactccgtctcaaaaaaaaaaaaaagaaaaaaaagaaaaagaaaaaagaaaagatcccctgtgtctgcccactgcattgcctccccagacccaaccagtggggacagctgcgtccagctctgggggctcccagacagccaggccgaagggctctcagcccctggcagtgctggcccgggacaaggccctcgggtcttcagctcaaggcccaacaggaaacagcacgggtcctcccttgcctttgtctacggggccttgaatactcggaccttcccaccctctcctatcattccctgcaccagcccttgcagaatcttccgcctcctctccattttacagaggaggaaaccgagggttgagcggcgaatgatttgccctgcctgcccagcacggaaaaaaatcactcttctggccccagtcgcctccctttctgtgctgtgagtctgtgtccagagcaggaagggctgctccgagctgcagggacgggctctgtgtgttaaaccttcaaatggcttccagggactcatggagcatccaggacacctggagatggcgactcctgggacccctggcccttccctcctctggccttcggtccgtgagggtgaattaagtgtgccacccaccaggggcagagacacatggagacagagattgagagacagagaacagagggggagacagaaagagagagggacatgaagagcaacggagttacaggaggatctgacgctccgttggggagacagggagaaatgtggggagatgcagcgtcccaggtgctccccagtggccctgcccctcctcccctctcccctccccaccaggcaggaccctcagggagctccagcctggacccgaaccctgtcccaccctgacgcacctgcaccaggccaggctggacctgtggggtgggtgcaggcctggccccagcccggccactgccctggaaacccctcccccgccaagatgctgatgtaacatccaggatttgatgttttactctccaattctgcaaatccagacgcaggaggttttaagaggccgttgcaccctgcaataaagtgcgggacacaggaatcttggtcctcggggcacccccttccctcgggggggtttcgccccccgcactcacggcccctgagcccgcgcggaggcccgacgccccgcggccgacgccggtccccgccccgggccgccattggctgttgccatggcaccagcccgtcttcccgcgccctcattggctgtctcacccgcatccctcatcccgcatcctcccccgctcgcggtggtctcgcccagcgctaggagcggcagcgccgcctgcccaggcccggaccgggctttgtccgccccggagcccctgcccgcgccgcggagaccccggagcccgcgcgctccgaggccaccccgggccgggatttccggtggggcccgcggagccgcgcagagggaggaggccccagacccaggcgccccgccagcccagctgcacgtaagcgggtgtgtgtcctcggggaggagggcaggggcgcgacctccgcctcgcgtcgaggtttccatccctggctctcagcattgcccgtcagcacagactctggaccctccatttccccagagtgggagctggaggggaaactgagtcccggtgagctgggcgtcagcgtttctgcagccggtcctgcgcacacacccactcacgggcttcaccatccggacctccctgaggtgatcggaggaagggatgggcaggccagtggtgtgtcttcgggggtgttgctgcacctctctgggtgtcagtttccctctctggaaagagggggtttggattaaaggaaggagaaaggcccctttgggcctggcttcccatacctgtgcctccctcccctgaaatgcagcccgctcaataagaccagcccccagtcatggtgccttcagggagtgatcgctcaggaaggcccccaggaggctacacgatgcaacctgggggtgaaagtaggcagaagagcttcgtggaagaagctgcactgtgtgggatggcaggacttagaaaaggtgctctaggcagggcaactgcacgtgcaaaggcctgagagaagagagcctccagcctctaagtgagtcgcggtgtacatggaggagtcggagcgtatcctgagggcactggggagccatggaaggtgtttgagcatgggagaaatgggatctcacttgtgacgtttaaagctccctctggctgtgcatgggggactgtgggaggccaggaagaggctgatcagaatgtcctcacagaggggtgtcaggagctgggggaggcatgatcccgctgggcagagcttggagggactagcttagtctgatgaggatgcagaaatgaccaccgaatgtggggagagggaaggtgtctgaggcttggcttcggtcagctgagaagaaccacgtgggggaggcctgggtttggggagcaggaggcagacatgtgttgctttgcacgtcatctggtccttccacctggctgggcatgggatggtgacctcagctggaacatggggctcgagccagaccccagggtctccctgcgtgtagcccccaaccccaagcctgatccccactggagacctgaacagccttggacatcatcggatcagggtgggaggtgccagcctctgccacctgacttccagtccctgtgcccctcccaccctgcccttgggcactcctgccctgcaggttcctcagaggggcaacccaaagccagagaggggcgggtcttgtcgggcctccagcctggacttcccagcccctctggggcagcatctgggtgccagacctcggttcctagggcctcgtttctccctctgggaacagccaaatggtggtccctgagactcaggacagaccaagaaggagccggatgacatggcaagccacacactgcgtcccctgagcaggacgggacagcccgactccatcctcccacctgcgactgagcccccacccctactcctgtcccagccgtgcccctggtgacatttgggtgggaggggaggggatgagggggcacctgggggtcagagaacaaatgacgggtgaatacatgtgtgtggccaggtggaggagggaggggaggagcaggtgggctggacagggccggtgtgaggaaggggctcaggctggcagggggaggtggcagagggatgggctgccattggtgcgtctgagacaaaggcggagggaggaggcgagcgctgatgggaaaggaacaaagagggaaggggggcgtgaaggggggctccggcgggagggccgagccgagggaggaggcgccggccagctggacagagggaggaggccaggccagagccagaagacggccagaggcacaaagaagccagcgcgctggcagagtcaagggatggggcaggggctgccggggccagcagggaccagctgaaggctgcgcagggggtgcgggccacacaggtagccaccctgagctcagccaccgatggagggtcgtggggctgctgcggtgatggcggtgggcttgggtccatctgtcctgccgtttctgcacagcttaggtgtcacccactggccttcgtggtgttttcattgtccatcggcagggacagctggtggtctgtccgccccgcgtgtctggctgtcagcctctgggcaggcttgcttttatgggggagggtcctgtctgtctgtctgtcgccctctctggctgtgagcctgggggtgctgggctggccagtcggcttgctgggttaggctgtcccagctgtctgtgtgtttgtccggctgtcaggatgtgtcctgggggctgggaaggagaggccgacccatcgtctgtcggtcgactggtcagttggacgttcagctgtctgtacgtctgtctgctggcccctctgtctccccttggggccacctctcactccacctgcccctctgcgccccggattgcctggccaccaccacgtgggcctgtacttgtccacaccagtgactcctgcctgagaccccccccaacccaggatcaggcaggacggctggggcttaggtcaggggccgtctgtccggaaggcatcaccgcgccctccccagaccatcagctgaaccctctgaccctgtgatcccagacgctgcaggagctgaagatggcgagctccgtggcgccctacgagcagctggtgaggcaggtggaggccttgaaggctgagaacagccacctgaggcaggagctaagggacaactccagccacctgtccaagctggagacagagacgtcgggcatgaaggtgggggcctacatggaggaggtgggctagggtcccggggtggtgccccccggcagcccagtgcagtggctgatggcttcccgccctctttcccgcccctgcaggaggtcctgaagcacctacagggaaaactggagcaggaggcccgagtgctggtgtcctcggggcagacggaggtgctggagcagctgaagggtgagcggtggggccacccgcagagggagtgggggaggctggggggaaaggcaggcagggccgctgacctccgccctgtccccgcccatccagccctacagatggacatcaccagcctgtacaacctcaagttccagccgcccaccctgggcccggagcctgccgcccggacccccgagggcagcccagtacacggctccgggccctccaaggacagctttggggagctgagccgggccaccatccggctgctggaggaactggaccgggaacggtgagtgggcgtgggaacccagcctcgggcagctggagcatgactcggtccccagcgggctctgccctctaattcgcccacccgcatatgtctctgcccacacctcacacgccccacccacttgcatatggcactgcccaccgaacaaccccgcccacctcggagcttcgtccccacgtggcctccctccccctccccagcccggctgacctctgctggagttcagagaggatgggggacgttcctggctgagggaaaggctccttggagacgtccccaggggtccgagacacgcaggcgtcgccagggaccgggctgtgtccggtgccagggctcagccaggcctggagccaggcgggctcaaagccgtctttgtagagagctgtggcccaagaagcgtgggctcagggccagcagagggaggcagggtctgggcaccctgtgcagctgggaggggtcatgtggggtcagatggggccattgaagagcagcgtggggttgtctgtgctctgctgtgggacctcactcagctcccctaaaccctcccagcctaagactcctgccctgtaaaatcggaatggccgtgtctcccatgaggttaagggaaacctctgttgcacctggagcactttgagcctgaagctaccttgtaagctggagggaggttagcaagtatgggagaagtgttagaggcaggacagcctccctcagtctttcttcaaggaggagaatttccaaaggaattgctttctcttttttttttttttgtttagtacatatagtttgaaacagggtctcactctgtcacccaggctggagtgcagtggtatgatcatcgctcactgcagcctcgaactcctgggttcaggtgattctcccacctcagcctcccatgtcagggagtagctgagaccacaggtgcgcaccatcatgcctggctaatcttttgtacttttttttttttttttttgagacggagtctcgctctgtcgcccaagctggagtgcagtggcgcgatctcggctcactgcaagctccgcctcccgggttcacaccattctcccacctcagcctcccgagtagctgggactacaggcacccgccaccacg[187 bp omitted]gagggggtctcgctatgttgcccagactgttttctctcctttaatttttttgcatcccccagttaatttcaatacccacccccccccccttaccctagctcggggagtgccacgggagagaccttgccatgttgcctgttaaccttggcatacagtaagcgctaacaagtgattacaaatatcaaaataaacacacacggcgccgccctctgagcccgcccccgctgacttgctccccaggtgtttcctgctgaatgagattgagaaggaggagaaggagaagctctggtactactctcagctgcagggcctgtccaagcgcctggacgagctgccgcacgtggagacggtgagccggccggggagccagggggcagcgcgcccgccccactcagggtgcgggaagcggcgtgggggaggaacggggcctggcccgggcgcccctcaccgtggcccgcccgcctgcctttgccagcagttctcgatgcagatggacctgatccggcagcagcttgagttcgaggcccagcacatccgctcgctgatggaggagcgcttcggcacctcggacgagatggtgcagcgggcacaggtgcggcggtgggcggggtggcgcggcggtaggcggggccctgcgccagtgggcaaatcagagtgcagatattatgggcggggtctggggtaatgggaggagtcttatgcctcctgggttggggggcgcgggttctggttcaggaggcggggccagaagctggaggtgttggtgggtggagtcaggaggctcagagcctgagcacaagggcggtggggtgcgacagtggaaggtggcatggcctgtgggcagggccagatcagcaggtgggtggggcctagaaggacgaggtctaggttctgggtggagcccaaatgggaagtgggaggagtcagagcctgggatggactaaaggcggggtttagacagtgggtggggtcatatcttaggaggcggggcttagggagctggcagggctggatcagggagaaggcagaggtagggtcagggcctggggcggggttatcaggaagaggcggggtcagagcccagggtggggtcatcccagggagaggcggggtcagagccgggggcggggtcagctccagcacttgccctcgtgtggtcctgagcagatccgcgcctcgcgcctggagcagattgacaaggagctgctggaggcgcaggaccgagtgcagcagacggagccccaggtaccgggtggggcagagccagggaccaggggtggtgtcggcccaggcagaacggggctcctcgagttctgcccgcccccgcccacatcatcacgggtgagcagactgggtgctctgggactgtacccccgaccctggtgctctccctgcaggccttgctggcggtgaagtcggtgccggtggacgaggaccccgagacagaggtccccacacaccctgaggatggcacccctcagccgggcaacagcaaggtgagggggagggtgaaacgggggctggcgcagctgtctgggctggaagggggatcaggtctgcatcctcgccagtggtggtgccctcccatgcctccatccagcaccccctcgggtgtaggaaggcccctctggcgtgcagctcatgcagaagctgcgggcctggcgaggtggatggggaaatacgtcccgtagcgggggctaagtggggcaccatagacgtccccgtggagtcccttggctctgcgcggccaccctaggaatgccaggtgaggggggccagcctccccgaagcacgtgtgcagcctcctagcgtcccctcatctgtcccccaggtgggcgtggggctgcccttggggacggggcaggggtcacagggctccgaccgggtttccaggtgtgcggggggcaggtgagggaccccaccctgaccctgccctccccccaggtggaggtggtcttctggctgttgtccatgttggcgacgcgcgaccaggaggatacagcgcgcacgctgctggccatgtccagctcgcccgagagctgcgtggccatgcgccgctcgggctgtctgcctctgctgctgcaaatcctccacggcaccgaggccgcggccgggggtcgcgccggggccccaggggcaccgggcgccaaggacgcacgcatgcgcgccaacgcggcgctgcacaacatcgtcttctcgcagccggaccagggcctggcgcgcaaggagatgcgcgtcctgcacgtgctggagcagatccgggcctactgcgagacctgctgggactggctgcaggcccgagacggcgggcccgagggaggtggcgccggcagcggtgagtgcctggcctggtgggccccctccgcgcaattaacgtgcagctagggcttcccgggggatgggcgactaggacctccagcctttgctgcctgccttctggcgttggaggctgcagtaccaggctccggccgaggcctgtgggggcatttgacgttgggaaaagacccgcccatgatcgtacctggcgcagagtaaacgctcgggaagtcgctgaatgcatggatggatcgtgggtaactctggaaagttgggtgcagactttgagattctttttttgcagttgatcgcaaagttaatatgggggccgggcgctgtgactcacacctgtgatcccagcactttggaaggcagaagcaggagaattgcttgagcccaggaatttggggctgcagtgagctgagatcatgctactgcactccagtctggacaacagagcgagaccctgtctcgtcagttttatttttaaaaagggcagaagcacagctgaaaggtgtggtgctccaggaactacctcgcctcccttcccaaggctgagtgagagaggccaccccatcatcccatcttagagaggctgggaaaggaagtcccaactttgcagccatttgcaaagctcccgggatccttcaggcctggggcgggcgggttgcgggaccttcgggagtcacctgggacatttcctgggaatgggggctctgatctggtccctgtgcccacagccccgatccccatcgagccgcagatctgccaggccacctgtgctgttatgaagctgtcctttgatgaggagtaccgccgtgccatgaacgagctaggtgagtgtcccaggtcctctgggaagccatcctccagcccccgaacaggtggtggctcctcggccgctaaagggacacaggctgggtcatctgagcttgggctggggattggagcccggagagggacagactccctggagtcacatagcacctctcatgagtggaccgtcaccctgggccctctgtccccatgagctgcgtgtggcctcccgatctggtctgaggcttcgggggtgactttcagccctaagttccctggggctcagaacagggaacggaccagaagggcaaagatagatagaagacaggcccagaattggaactgtagggggtgttttacgtttgaggacattgcaacatcttctctttgtcaatataaaaagtaattgaggccgggcgaggctgctcatacctgtaatcccagcagtttgggaggccaaggcaggaggatgactttagctcagaagttcgagaccaggctgggcaaaaatagtgagaccccatcactacaaaaaaaaaattagtcccagctactggggaggctgaggtgggaggatctcttgagcccaggaggttaaaggtgcaaggagctatgatcatgccaccacactccagactgggcaacagagccagaccctgtctcaaaaagaaaagtcttgctgtaacttttttttgagacagagtctcactctgttgcccaggctggagtgcagtggtacaatctcagctcactgcaaact[133 bp omitted]tcggcctcccaaagtgccgggattacaggcgcgagccaccacgcccggccactttacatcttcaaactctgtcccggtgaaacatttcctgctcatcctgtccccagcccctggcacccacccccatcctactttctgtctctgtgaatctgatggagctagggacatcctaggagtggaatcacacaggatttgtcattttatgcctggcgtctcccactgagcgtgacatcctcaaggtgcacctacgccatagtctgtttgtttcagagcctcattccttttgagacagacagggtcttgctctgttgcccatgctggagtgcagtggcgccatctcggctcactgcaacctctgcctcccgggtttaagcgattctcctgcctcagcctcccaaagtgctggagttgcaggcagaaggagccaccacacccggccaaagcctggctcccttctgaggctgcgtgacatcccatcgtgtgcacagggcacgctgggctgacccacttgtcctcctatggatgctctagctgccccccactcctggctctgtgaatcgtgctgtggtgaacctggatgtacgcgtttcaggctggaagttttctgagatatgtccctaactcacttccccaaagggtgtctccactgacccactcctgctctgagaacagtcacatttgcctctgttgtctttgaagagggagaaaagtgttttggtgacaagtcctcctctccctctgactcacaggcgccatctccccgttgatttcccccttttgtaatggggaagcggggcgagtgaagagggtgggtgtggccgtcacccatccctacagccctgtctgtgctggggatgctgctctccatctgatggtcttggggtgtattattagaggactcagggggccttccccgaggcacctatcaaacagggcagggaagaacattccaggctgagggaacaacaggtgcagaggcccagtggctggaggaagcgtgagccaggaccgagggctgacaggaggcgggggtggcagtcacagggcactgggggtacccctgtgggtctggcagcagggtgaggccataccggctcctggaggaggtctcagacttgggcctggaaggggaacttgagggcaggtctggggcatagggagggcctctgggcaagggagtgaggtggggcgctgggcagcaggcagggtcatccctgccacccaccaaccttgttgggtcctcacaggtgggctgcaggccgtggcagagctgctgcaggttgactatgagatgcacaagatgacccgggacccgctgaacctggcgctgcgccgctacgcgggcatgaccctcaccaacctcacctttggggacgttgccaacaaggtgcccgggggcagtgggtgggctggcactttcctcatccagtcttccagggactgagcctccttccaactcatcccagcctcgaaacagccctgagagctggggccacttgtccccaacttacagacgggtagactgaggcccagagagtgcggtgtggggggacgggagcgcgtgctgaacctccccacctggcggtgtcctcacgcccaccctgttgctgcctctgcagaaaatggccctcattgtagagggggcctcagggccccgaggctgggtgtctgcccctgtctgggcctcagtttcccgacctgagcatggggtaaccgtccccggtagtggtcaggatcagcaggggtctgagtttgcagctgcagcacacagacggggctgggaggtgaggggcacagtctcccttgtgtcccaaccccgtgaccccggctgcataacccccaacaggccaccctgtgtgcgcgccgcggctgcatggaggccatcgtggcccagctggcctccgacagtgaggagctccaccaggtacagggcggggtgctgggaaagccttccagggtgtccctgataggcagaggcccctccccagcggtgtggtgggctggcaggggtgtcccgtccgactctctgcagactcacatttgctggggggtttggggggcctggaccctagtcccaccacacttgcccctcaccccacccaggtggtgtccagcatccttcggaacttgtcctggagggccgacatcaacagcaagaaggtgctgagggaggcgggcagcgtgactgccctggtgcagtgtgtcctgcgggccaccaaggtgggcacccggtgggcggcagggatgcttcttcagtcactggaaggagactgctggcggcagcgggcgagctctccgacttgggaggaaatcaagttgaacagctcactgcttagcgggtggtccagcctcagaccggctggggctcactcctcatgtcactgctctttgaaagcaaatgtgggctgggcgccgtggctcacttgaggtcaggagttcgagaccagcctggccaacatggtcagaccccatctctactaaaaaaaacagccaggcgtggcagcgggcgcctgttagtccagctactcgggaggctgaggcaggagaatcacttgaacctaggaggcggaggttgcgccactgcattccagcctgggccacagagca[212 bp omitted]gaggcaggagaatcgcttgaactggggagtcggagcctgcagtgagtcgagatctcgccactgcactccagcctgggggagagagtgagattccgtctcaaaaaaaaaaaacaaaaaacaaaaaaacccaacttcactgaatgtgagcgtgggagcctttcctccgggccactcaggccctgacccgcccctctcccgcccctcgtccaggagtccaccctgaagagcgtgctgagcgccctgtggaatctgtctgcacacagcacagagaacaaggcggccatctgccaggtggatggcgccctgggcttcctggtgagcaccctgacctacaagtgtcagagcaactcgctggccatcatcgagagcggcggcggcatcctccgcaatgtgtccagcctcgtcgccacccgtgaggactacaggtcggcccccacccccccacccgcacacaggcagctgcgctcggggcgggcacagggctgggctgggcactgtcctcccgtgaatgcatgctcccaaggcttccccaggggctgctgtttgcagcataaatacgtcccaaatactgcgtgagatatactaaaatgc[133 bp omitted]gaaagcctgtccctactaaaaatataaaattagccaggtgtggtggcgggcacctgtaatcccagctactcgggaggctgaggcagaagaatcgtttgaacccaggaggcagaggttgcggtgagctgagattgtgccactgcactccagtctgggcaacaagagcgaaacttcatctcaaaa[169 bp omitted]ggcatggtggtgggtgcctgtagtcccagctactcaggaggctgagacaggagaatggcatgaacccgggaggcggagcttgcagtgagctgagattgtgccactgcactccagattgggcgacagagcaagattccgtcttaaaaaaaaaaaaaaattacttcaggctgggctcggtccctcacacctggaatcccagcactttgggaggccgaggtgggcggatcacctgaggttgggagttcaagatcagcctgaccaacatggagaaaccctgtctctactaaaaaatataaaattagccaggtgtgggccgggcgtggtggctcacacctgtaatcccactttgggaggccgagatgggcaggtcacaaagtcaggagatccagaccatcctggctaacatggtgaaccccgtctctactgcaaatacaaaaaaaatagccaggcatggtggcgggcacctgtggtcccagctactcgggagactgaagcaggaaaatggcgtgaacccgggaggcggaggctgcagtgaggtgagatcacaccactgcattccagcctgggcgacagaggggactctgtctcaaaaaaaaaaaaaaaaattaaccaggtgtggtggctcatgcctgtaattccagctactcgggaggctgaggcaggagaattgcttgagtctgggaggcggaggttgcagtgtgccaggataaggccattgcacaccagcctgggcaacaagagcaaaactgtctcaaaaaaaaaaaaaaaagaaaaattagcttggcttggcgtccacatgtagttccagctacttaggaggctgaggtggaagaatcacttgacaataggaggttgaggctgcagtgacctgtgatcacgctactgcactccagcctgggtgatgggagtgagaccctgtctcaattttattttaaatcatattaatataactgtcttcattaaaatatttaaacaatagagaatacttatttataaaaataaataatatttttaattgaagt[144 bp omitted]tgaaactccgtctctaataaaaatacaaaaattagccagtggggtggtggacgcctgtaatcccagcactttggcaggccgaggtaggtggatcacctgaggtcaggagtttgagaccagcctagccaacatggtgaaactccgtctctactaaaaatataaaaattagccaggcggggtggtgggtgcctgtaatcccacctacttgggaggctaaggcaggagactcgcttgaacccaggaggtggaggttgcagtgagcggagatcatgccactgcactccagcctgggtaacaagagtgaaactccatctcagaaaaaaaaaaattattaaaataaaaatgttgttaaataagaaatattaaaataaaaatatttacatgttatttatgaaaacacaaaatattatttttacctggtcatcgtggctcacgcctgtaatcccagccctttgggaggctgaggcggttagattgcttgagcccaggagttggaggctgcagtgagccatgattgcaccactgcactccaggctgtacgacagagcgaaactttctctcagaaaagatagatatagacagaatctatctaagtataccccagataccacataggatatgtgcatgctgttttttcctttttttttttttttttttgagatggattcttggtctcttgccaggctggagtgcagtggcgcgatctcggctcactgcagcctctacctcccgggttcaagcagtgctcgtgcctcggcctcccgggtggctgggattacaggtgctcgccaccacacccagctaatttttgtatttttaagagagagagggtttcaccatgttggccaggatggtctcgatctcctgacctcaggggatccaccccacttggcctaccaaagtactgggattacaggtgtgatccactgcacccggcctaccttttttttttttttaactccatctcaaaaaaataaaaataaaataatttagtctctgtcatgcaatctttgggatatacttataccaaaaattagtctttccaagatccaaacctaaccagatgcgtttacttttacctgccacatctggcccccccatccttcggtgggcaggggagggtggggggtggcccaggctaacccgccctgtgcctacaggcaggtgctccgggatcacaactgtctgcagacgctgctgcagcatctgacttcgcacagcctgaccatcgtgagcaacgcgtgcggcacgctctggaacctgtcggcccgcagcgcccgtgaccaggagctgctgtgggacctgggcgccgtgggcatgctgcgtaatctggtgcactccaagcacaagatgatcgccatgggcagcgccgccgccctgcgcaacctgctggcccatcggcccgccaagcaccaggcggccgccaccgccgtgtccccaggcagctgcgtgcccagcctgtacgtgcgcaagcagcgggcgctggaggccgagctggacgcacggcacctcgcgcaggcgctggagcacctggagaagcagggcccgccggcagccgaggccgccactaagaagccgctgccgcccctgcgacacctggacggcctggcccaagactatgcttccgattcgggctgctttgacgacgacgatgcaccgtcatccctggctgcggccgcggccaccggggagccagccagccctgccgcgctgtccctcttcctgggcagccccttcctgcaggggcaggcgctggctcgcaccccgcccacccgccgaggcggcaaggaggcagagaaggacaccagtggggaggcagccgtggcggccaaggccaaggccaagctggcgcttgcagtggcgcgcatcgaccagctggtggaggacatctccgccctgcacacctcgtccgacgatagcttcagcctcagctctggagacccgggacaggaggcgccacgggagggccgcgcccagtcctgctcgccatgccgcggcccggagggcgggcggcgagaggcaggaagccgggcgcacccgctgctgcggctcaaggcggcccacgccagcctctccaacgacagcctcaacagcggcagtgccagcgacgggtactgcccacgcgaacatatgctgccctgcccgctggccgcactggcttcgcgccgcgaggaccccaggtgtgggcagcctcggcccagccggcttgaccttgacctgcccggctgccaggccgagcccccggcccgcgaggccacctccgccgacgcccgcgtgcgcaccatcaagctgtcgcctacctatcagcacgtgccactgcttgagggtgcctcaagggcgggtgcagagcccctcgcggggcctggaatctctccaggggcccggaagcaggcctggctgccggcagaccacctgagcaaggttcccgagaagctggcggctgccccgctgtctgtggccagcaaggcactgcagaaactggcggcgcaagaggggccactctcgctgtcccgatgcagctccctttcctcgctgtcctcggccggccgcccaggccccagcgagggtggtgacctggatgacagtgactcctccctggaggggctggaggaggccggccccagcgaggctgagctggacagcacgtggcgggcgcccggggccacctcgctgcccgtagccattccggctccccggcgtaaccgaggccggggcctgggggtggaagacgccacgccgtccagctcgtcggagaactacgtgcaggagacaccgcttgtgctgagccgctgcagctctgtgagctcgctgggcagcttcgagagcccgtccatcgccagctccatccccagtgaaccttgcagcgggcagggcagcggcaccatcagccctagcgagctgcccgacagccccggacagaccatgcctcccagccggagcaagacgccaccgctggcgcccgcgccacagggtccccccgaggccacccagttcagcctgcagtgggagagctacgtgaagcgcttcctggacatcgccgactgccgggagcgctgccggctgccatctgagctggacgcaggcagcgtgcgctttaccgtggagaagccagacgagaacttctcgtgcgcctccagcctcagcgcgctggccttgcacgagcactacgtgcagcaggacgtggagctgcggctgctgccctcggcctgccccgagcgcggcgggggcgccgggggcgccggcctccactttgcagggcaccggcggcgggaggaggggccggcgcccacgggttctcgccctcgcggcgccgcggaccaggagctggaactgctgcgggagtgcctgggagccgccgtgcctgcccggctgcgcaaggtggcctccgcgctggtgccaggtcgccgcgcactccccgtgcccgtctacatgttggtgcccgccccggccccggcccaggaggacgactcctgcactgactccgcggagggcacgccggtcaacttctctagcgccgcctcgctcagcgacgagacgctgcagggaccccccagggaccagcccgggggaccagcgggcaggcaaagacccaccggccgccccacctctgccagacaggccatggggcaccggcacaaggcgggaggcgccggccgcagcgcggagcagtctcggggcgcgggcaagaacagagcagggctggagctgcccctgggccggcccccgagcgcccccgcagacaaggacggctcaaagcccggccggacccgcggggacggggcgctccagtcgctgtgcctcacgacgcccactgaggaggccgtgtactgcttctacggcaacgactcggacgaggagcccccggcggccgcgcccacgccaacccaccggcgcacatcggccatccctcgcgcttttacgcgggagcgtccgcagggccggaaggaggcccctgccccgtccaaggctgcaccagctgccccgccgcccgcccggacccagcccagcctcattgctgacgagaccccgccctgctactccctgagctcctccgccagctccctcagcgagcccgagccctcggagccgccggccgtccatccacgaggccgggagcccgcggtcaccaaggacccgggcccaggaggcggacgcgacagctcgcccagcccgcgggccgcggaggagcttctgcagcggtgcatcagctcggccctgcccaggcgccggccccccgtgtctggcctgcggcgccgcaagccccgagccacccggctggatgagcggcccgcagaggggtcccgggaacgcggcgaggaggcagcgggctcggaccgggcctccgacctggatagcgtggagtggcgcgccatccaggagggcgccaattcaattgtcacgtggctgcaccaggcagcagctgccacgcgggaggcctcgtccgagtccgactccatcctgtccttcgtatccgggctgtcagtgggatccaccctacagccccccaagcacaggaagggacgacaggcggagggagaaatgggcagtgcccggcggccagagaaaaggggcgcagcctcagtcaagaccagcgggagcccccgttcccctgcaggccccgagaagccacgtggcacacagaagaccacgcccggggtgccagctgtgctccggggacgaacagtgatctacgtccccagcccggcaccccgtgcccagcccaaagggacccccggcccccgcgccacaccgcggaaggtggcgcccccttgcctggcacagcccgcggctccagccaaagtcccgagccccgggcagcagcggtcgcggagcctacaccggcctgccaagacctcggagctggcgacgctgagccagccccccagaagcgccacaccgcccgcccgcctcgccaagaccccctcctccagctcctcccagacctcgcccgcctcccagcccctgcccagaaagcgccccccggtcacccaggctgctggggccctgcccggccccggagcctccccggtgcccaaaacgccggcgcgcacccttctggcgaagcagcacaagacgcagagatcgcccgtgcggatcccgttcatgcagaggccggcccggcgtgggccgccaccgctggctcgggcagtcccggagccgggccccaggggccgggcggggaccgaggcgggcccgggggcgcgcgggggccgcctgggcctggtgcgtgtggcctcagccctctccagcggcagcgagtcctccgaccgctcgggcttccggcgacagctaaccttcatcaaggagtcgccgggcttgcggcgccgccgctccgagctgtcctcggccgagtccgcggcctctgccccccagggcgcctcgccccgccgcggccggcccgcgctgcccgccgtcttcctctgctcctcgcgctgcgaagagctccgagcggcaccccggcagggcccggccccggcccggcagcggccccccgcggcccgacccagccctggcgagcgccctgcccggcgcaccacctccgagagcccgtcccgcctgcctgtgcgcgcgcccgccgcccggccggagactgtcaagcgctacgcgtcgctgccgcacatcagcgtggcccgcaggcccgacggcgccgtccccgcggcccctgcctcagccgacgccgcgcgccgcagcagcgacggggagccccggccgctccccagggtggccgcgccgggcacgacctggcggcgcatccgagatgaggacgtgccccacatcctgcgcagcacgcttcccgccacggccctgccactgcggggctccacgcccgaggacgccccggccgggcccccgccgcgcaagaccagcgacgccgtggtccagaccgaggaggtcgccgcccccaagaccaactccagcacgtccccgagcctggagaccagggagccccccggggcccccgccggcggccagctctccctcctcggcagcgacgtggacggtcccagcctcgccaaggctcccatctccgcacccttcgtgcacgagggcctgggggtcgccgtggggggcttccccgccagccggcacggctcccccagccgctcggcccgagtaccccccttcaactatgtgcccagccccatggtggtcgcagccaccaccgactcggccgcggagaaagccccggccactgcctccgccaccctcctggaatagtggcctaggccggccttctggaacgttctctcccggccctgcggcgcggtctggctgccccatgggcctgcgctgtagacgtcccccataggtcgccccagggcctctgcccacccgagccccaccactctcagaacccccgcccagcgcacggcgacctcgcgcctcaccggaagaccttgcctctgtgccgcggaggtccaggaggaaacggggcggccgctaggcctcaagtcccgaccgtggagcgctggcaagggcgtcctggcccagccctgagcgcgcggcccttcccctgtcggaagccgttgcttgaccccgggcgagggaggcggtagcctccgggtccgggtctgggtctgggtccgctgcttcgcagggacagcgctggggaggtgacggcgcccgccgcaggtggggcgaggctgggggagggcggcgccgcggcgggcctgccagctgggggcctttgcggcgcgcaggggcgaagcctgtaatcactgcagccgccggtaattcgctaatgagggctttgcagggattgttttcattctcagccccagctgtgggagtgcgggtgggggtgtggccgagccccggcaggaagccccgcccagacggtgttcagggaacccggagcccaagcgctccggcggagcccaaaagggtgggggtgggaggggcagaggccaacggatccccctgcctgtcgcaccccttggcgggagacgggaaggcagcgggctgcgtacgatgggaccctggtgcagacgccgggccggctgacatttggaccccatcccagaggagatgctggctaccagctggggcgaccccaagggtcgctggagtcagtatcggcccggcgcagccgcggcgggcgaggccaatggaaaggagactgaggggagtcccggcagtgagcccgaggccctgggacctggagcccgcgctggcctctccccagcggagcctgcacgttacggagaccatcacatgtgggcgtggtcagtgcccaggaccgcaccgctgctcatcttgtcccttttcaattcccttctggttcatgatgcataaagcgctaggccctagaactccagaaacagcacagctggggcggggacccagccttgccctccacccgaggctctgggacaaggcgggaggttcgggggccttccggcaggtgaacgcagggctggagagtatttggtgccagatgaggtgaaagcttatagaagggcctgaggggctcggctgcctcatcccctggcgggggaggctgggagctgggcctcctgcgtggggtgggactcgcaggggccgggtctccgtgactggggcaacgcctcgtcctgcagagggagccgacgacctcttttctgcagaaaagctccagcaggcgctgccttcacccacggatctgcccaggctgaaggcacacgctcaatgccccacgtgccttctccaggaggaacgaagcagggtttgagggttgggtggatggagctcagaaggaaaccccagccccaccacggatgacaccatccctcccgtcccatccccagcatgggcaaggccagcctttctggcagaaggagctgtcctcaactcagggccgctgtgagcaaagctgaccccagcccccacccccagttaacactgctgcttctctgaatgcatgtcacgctgcaccccatgctccgggcccacaccctgcaggacaaggagctccagacaggacgtccataagtcaccgaggtgtgccacccagcaggtgctggaggtgcccaatgctccctcctaggacctcgcagccaggcaaggctgtcaggttgttttgggggaagagggggtcatggatggctgagcagagagcggggaaaatgcaggctgagtggggcgacctcctgcctgccaggagccccctttcaggacacagcgggggtctcacacttgctgtccccatccatggcccgagggggaacctggtggtctcttctgagcttttggacttggggatgccaaacacgtgctcaccctcacactcgccccggcccgctgcgcccctaattgccaaagggtagggaaatggcgaagccagccaccaggtcgctggtgacagggccagggttatgcaggaaggtggtgcggcattgccttccacatatgtaagtctctgggcggcgccctcccagctccctgcctctgtttccccatgtgggccgtggggaactcccagagctacctcttgggggagcgtggtggcagcgatgatggggagacgcctggaagctcacagaacttgggtctggctggctcctgcccgtgacgccttgcccagcagcaaggtgcgcaacatggctgccagccccgcctcccacccccaccccgagtcctgagctcactttcgccttctccatcccctgccgtgggggccacagccacacctcaccgcccagtccagctgtctccagaaggggacaggcagtccgcggtctctggacaatcaactcaaggtacgcccactgcaaggcctccctcccaccgcggcccctgcctggccacctggcctctctgcaccagggtgacaaggggtcctcgtctgccccccaatgctccagggccagtcctaaggagctgagggtctgaggacgcagggagggtggaggtgtcctgaggctgatggacagtgaccgccactggcccccaacatgaccacacgtgggtgctgaactcggggcgccgtgcccaccggcatggtcctcccgagctccgacagcattacctcacccggccccatctgttgccccggtccagccctgatggcgcgcgcctggtctgtctgattcccctagccgccaccccacgtttctgtaccgggtctctgcagtgttaaacggacgtgtaaatagtggtaaatagtgaaagcctgtccttccctaaatgtaaagccatctgtccggcgtaaggacgacaccgtcagctgtccgactcgcacacatttaataaactgagctcttgcattgcctgccgccatcacctcttcctcaaaatgggctgtgggcgggtaggttcatcgctgtctatgtgctgccacagaattgctgagaccccccaggttagatccctggaagcagagccagaaagcagaaactgggggcacagggtttgtgggcaccccacccagatgggccggggaggcactggctgaggccaggagtctccccctggtcccaagggagggcaggctccagggggtgcacagcaccccagacagggggtccaacctgggcattggtacctgggccagttattatggcaggccccagtgtggggcaggaggcacccatgagccactaggagctgtggctggtgcaacagctgggatggggcagccacagcagccactaccggggagagtcaatggtggacaggggctgcgggagctgggacggccccacgtcaaagccacttcagggagcacagccctggcccagctggggggacaaggaaagctatgactgcaagcagcacagaagtgcagggtgggaagggatggcaggagccggccccctccccaccttccaccctgggacactgccgggacctccctcggccaggtgagcagcttcagaagcatgaccagtgagaagtccctagggcccaggccgggctagccaagtcccagtttctggatgaggcgcctcccaggctgtgtgtggcaggccccctttcttcagggaataagaaacatcttccacattcaagaaacaaagctggctgtgggtctggagagagggtgaggcagccccaggtctctgggtcaggcggacggtccctgcatgcagtgcccggcaggactgagcagggttcccggggtcgccggtacccatccctccccagcttccggggccccgggacggagccgctcacagaggcaccattcagacggccagacacacacgaaagctttatgtgcagggcccagcctctgggccgccttgcccaggtttccactcaagttgctatttaggatgaaaagcctttggcaagaccctccgccgcactaacgccccctcccccagggccagaacccgcagggaagcaggcccaggacctgctgcagctggcagggtggctatgagactcaggacaccctgggctcctggccagtgactcacagcggtcctccagcaagggcagtggctgggagacacccgtgccgtggagctaggcccagcctggctgggtctcagggctgcttctcttgggtgaccccagcggcccagggtcgttgtgaagatcaacgtggcttgtgggaggagcccggggcccagaaggaagtggggtcaggggctcaggctggccctcgggctgctctgacattgggtgggcactcgctggatggaatcacagttaacacctcgatcccaacacctggactcagaagtggacaggcgagtgcctgccccgggagaggaaggaggtggcacctgctcccaggggccccactgcagagcacggccactgtgagctgacgacagaatcacagtacagcaataatgtccctatcctcttccagaaccccagtggggccctcaggtcacgcaggacggagccagctgggtgggtcccaccaactcggcatgaatgagacgacggatgaaccgcagccccagcatcaggaggggcgcctgtgtcaacacccacgtgggctgggaccccgtgaatgccagtctggggccgacggacccccagggaaagcctgggtgcaggccaccttgtgcgctgcccaagcctgcaggccccgagaggtcagcctgaggaggcagcctcggctgccggtaatgctgcctgcttcatctgggccacctcccgctccaggtcctcgccggctcgctgcaggagctcacacctctgcctcagcacgttgcccgcctgctgcagccgctggttggcagccacgtaggcccggctttgctggtagagctgctctcccggggcctccgcatcctccatcatcctgaagggaactggggggtctgagacaggacacagcagcatcactgcctgctgaccaccccatcctcctgggcacccctcactactgcccccaaagggcagggttccctgcagtccccgagtgagcttgccagccggggtcttcttaacatgacggatgcagccaggtgtggtggctcacgcctgtaatccagcactttgggaggccgaggcgggaggaacacttgagcccaagagttagagaccagcctggacaacatagtgacacccccatctctaccaaaaaatacaaatacaaaaattagctgggcgtggtagcacgcatctgtggtccctacttctctggaggcagaggcaggaggatcgcttgagactgggaggccgaggctgcaataagctatgatcgtgccacggtactccagcctgggtgacagaatgagaccctgtctcaaaaataaataaaaacaaaaatcaagtaatggaggcttcctcgtccatcagctgggagaggcacagtggctgggtggcaggaggggcttccagctctaggctacccgccttagcaaagcgtgtgaccagggggatcgggtcacagaaagagctcaagcctcgccagcagtggccctcctgggggcggggcttccattcctgcaaaagccgtggcacccaccgggatggactccactgagctggcctggctctcattcctgctgtctctggaagccagagacgcaacaagcccgccaccgaaaacctctccaggggccgtgcaacctcctggagcacacacttagggaggcaggggtggcgaaggtgagaggtgggcattgacgtcctggtgactcccacattcagcagaaactacgtatggctccctgctcccccacgtatgcaagcccagtgcagcagggctgaagcagcaccgacttcagggtcactcagagaagcgtcaggggcccctcggctctggcctgcccctcggcagtgtggtctcccacggacgaaggctccacgtgccgcacgggtctgggctgatcaaatcacctctgtcatcacctgctttagcaacagggtgggaaaggccgggcagtgcctggatgaaggcacaggaggccccctaccttctgtgagcgccccccgtcccccgcacagcgtgcctcagtttcgccacactcaacggccatggacctgagcccatgaagctcaaaccacggccccagcaccctcaggtgaccgaactgcatgctgggaataaaaccaactcatgcaccttgaccagtaccggcccacagaaccttccagatgatgcgcacacctcccaccgatgctggtccacaccagccaccagccatgtgtggctcctgggcacttgaaatatgtctaaagggaaaacacaactcaatttttctctttttttctttttcagagacagggtctcactctgtcactcaggctggagactccaactcctgggcgcaagcaaccctcctgcctcagcctcctgagtagctaagaccacaggtgcatgccaccacacccagctagtttgtgtatttttggtagatataggttttgctatgctgccaaggctggtcttgaactcctggcctcaagtcatcctcctgcctcagcctcccaaagtcctgggattacaggcatgagccactgcacctggccccagaattttctaatattactttttaaaaatgttcccttagaaattcacagtttctatcattccacatggctcattttcttttttcttttttttttttgtttgagatagagtcttgctctgtcacccaggctggagtacagtggcacgatctcagctcactgcaacctccgcctcctgggttcaagcaattctcctgcctcagcctcccaagtagcagggattacaggcatgcgccaccatgcccagctaatgtttttgtattctcagtagagacggggtttcaccatgttggccagggtggccttgaactcctgacctcaaatgatccgcccacctcagccacccaaagtgctgggattacaggtgtgagccaccgcacctggccgattcatcttcatttgtttcccgccagccccagaacagcctggggcagacattcttgtttcttttgttcacttgtccattagcagtgctctaagcgcagagcccagcacacaggaagtgctcaagaaaaggattgttgaatgaatgaatgagcctcatccagaacacaaaattcacccaactgcactgctgaatcctttggtctctgactagcttccacctcgtaaatcaggagtggacaagctttcctgccaaaggctggagtctctgctcccactactcaactctgcccttctggtgtgagagcagccactaaccgtatgtgaatcatttggctgtgtgccgtaaacctttacttaccaacactgaaatctgaatttcatacctctttcaggtgtcagaaatgttctttttcacccacccccatttaaaaatgtgaagtccattcatagctcccagaccttaaaaaaacagccaggggcagggtttggggggccctagcttaccacctctgttttactttatttatttctatttattaattattattataattattgaaacagagtctcactgtggtccaggctggagtgcagttgcgtgatctcagctcactgcaacctccgactcccaggttcaagtgattctcctgcctcagtctcctgagtggctgggattacaggcccatgccaccacacccggctaatttttgtatttttagtagagacaaggttccaccatgttggccaggctggtgtccaacctctgacctcaagtgatccacccacctcggcctcccaaagtgctgggattataggcgtgagccaccgcaccggccacttatttatttttgagacacagtctggctgtgttgcctaggctgtatcctcccactttagcctccaagaagctggggctacaagtgtccaccaccacacccagtaatttttttttttttttgagacagtctcgcactgtcacctgggctggagtgcagtggtgcgatctcggctcactgcaaactctgcatcccgggttcaagcgattctcctgcctcagcctcccgagtagctgagattacaggcgcctgccactatgcccagctaactctgttttgtttttgtttttgtttttgttttgttttttcatttttagcagagacggggtttcaccatgttggccaggctggtctcgaactcctgggctcaagcgatcctcccgcctcatcctccgaaagtgctgggcttacaggcctgaaccacagcgcccggcctccacccctgtcagaagaaccctctgaaaatcggtcccactctacggaggagtagagggagactcggagaggatacggaccgtgcccatgttgcgggggttcccagggcgtggggtcaggagttaggggtgtgcttctctcccgtccccttgctgccggggtctcaggtccgcttttccccgggaccgggctccccctaccttccggggccaggatggtgaacactggatcctctgccggcgcaccccgcacatcctccaggatctgctccaccgtggggggcgctgggcgggtgggcagcagcacgcgcttctttgccttggagcccatctctgaaggcggggaagggggcgctgaccggggcgtccacctctccgcccttgcccgggctgctcctcccgcccagcgaactcgtacgcacccgtcgcggtcccgctcccggggaagcccgccctgtcccgcccctctgagctcgccccaggccctgaccctccctccgcccaaaaacacggtggccaaggcttcagggtctggctcaacctctgcctcagtttccccgcggtcaccccagtcgccggcctcttcccacctgggcgcgggacccgaaagcccagcgtcgacgacgcagccacttccgattccggtcggagcaccgccccgtccccgaacacgtgacacacacttccggcctcctctcccgccggcccgccgctcatcgcggggctccgccccgtcttaaagggatagtgcccttgagactcggatctcagcctctcaggcgaacccgaacctggacgcgctacgatgagagcgagttcgagtccaggctccactggctgggtagaaaagcatccgaggctcgtctttctgaaaaggggaacacggcactaggggacacgccacccatgtggctgacgggagcacaaaattgctgtccacctaagggagcctggtggtgcatgagcactcggcggccggaacacagcgggggcggggcggtcgcggcgcctccacttccggccaaggcgggtcctcccacctcggggacggtgctggaggtcaccttttcctctccgctgatgcctgggaaggcagaaagagcagagggcccttttcctctctcaggggctttattgagatgcagtttacataccataaagttctcctgtttatttcgttttgttttgtttttttagagacagagtctcactgtgtcgcccaggccggagtgcagtggcgtgatctcagctcactgcaacctccgcctcccgagttcaagcaattctcctgcctcagcctcccgagtagctgggactacaggcgcccgccaccacgtccgtcaaaatttttttttgtattttagtagagatggggcttcactgtgttgcccaggctggtgtcaaactcctgagctcaggcaatccgcccgcctcagcctcccaaagtgctgggattacgggcgtgagccaccgcgcccgg[136 bp omitted]ccgtctctactaaaaatacaaaaattaggctgggtgtgttggctcacgcctgtaatcccagcgctttgggaggccgaggtgggtggatcacgaggtcaggagatcaagaccatcctggctaacatggtgaaaccctgtctctactaaaaatacaaaaagaaaaacaaaattaaccaggcatggtggcggttgcctgtagtcccagctactcaggaggctggggcaggagaatggcatgaacccgagaggcagagcttgcagtgagccgagatcgtgccactgcactccagcctgggcgacagagcaagactctgtctcaaaaaaaaaaatattgttgagagagaaggaaggaaggaagggacagagagagggaaaaggaaagaaagagaaagaaaggaaagaaggaaggagaagaaaaaggaaggaaggagagagagaaagaaaaaaaagaaaaaggaaataaagagaagaaagtaaagaagaaaagggagaaaagaaaggaaaggaaggaaagagaaggaagaacggaagaaaggaaggcgagagagaaagaaaaagaaaagaaagaggaagaaagaaaaaggaaagagaaagaagga[172 bp omitted]aaaggaaggaaagaaggaag[137 bp omitted]atcgcaccactgtactctagcctagtcaacgtagggagaccctgtctcaaaacaaacaagaaaaaaaacaaaggaatcaccgcaggagaggattctgggccatggtgagccatgttctggggctggacattactgctgacccccggccattccctgctgttcccactgcctggggtccctgggcctgggcggactctttctccgtggccggctgcattctccatggactgatgtccggggaccccaagcagaaaccacctgagccctggggcctcgggcccaccctgctccagaggaggccacagactgagcaccttctaagcaacctttatttgcaaactctgaggttggacgcggtgcccgaggcggacagtgtcacgtttctctccctccactttcccctggcttttggggtgctccagcctctccccccagcccactcccgcccaaacccaaaatgcagaggagacttctctctctctctctcccgccaggcttcggggttccacggggcccatccctggcaggccaggcgtcgggtgctggtgctcgctcctctggggccagcctggggaggcagcatggcagcagtgcctgtcagggacccaggcgggggcaaggtcgctttctgagctgacaacttcaggttccagctggcagccagacctggggtttggtgggggtggccctggcacgggagagccaggcgtatagtgggaggtccatggacatgccgcagaggacggggcctccgagggtcacggccaggaggctcagcaccatggccgaggctgggcagcggtggtggggacaggcggcagctctaagccgggggcggctgtcgggggtggtgggtcccatgcaggagccctgctgctggtccagcgtggaggatgggggacaggaggtgcagtccctcggggagccgccgcggcaggtgtagcaggaggcatggcagctggagcagaccctcagcgcgggcgccgccgtgtgcccaggcccagcggtcaccagccttgtgtggttgaagaaccgcggggggcagtaggccaggcagagctgtcccaggatgtaggcggggccgtcacacgctgctcggggacacgcacgcaaaggcccgtcagcttgccacccgcagcctgttactcgccacccgcccgcctggggccacatgcacgctgcccacggtggccgccaccgcctcccagcagtgggccctgccccgccggcactcaccctggcacagcccctctgtgtcccgctgcacacacgcgctgctggtcacctgggggcctgtaggccgcgctgtcatgtcctcggccgtcccatagagcagcagcgtgtagcggtacaacgtccctggacaggggtcgcgggtgggcacaggaggaaaaggaggctctcggcagcctggtcctggtagtccccgggctccctccccttcagctcccacgcggggccctggactggttcacatctctcagggaattgcacacctactgtgcgcctgtcactggacaccgacatctcccgggtgactgcacacctactgtgcgcctgtcactgggcacctacatctcccgtgttaccgcacacctactgtgtgcctgtcattgcacaccatctcccgggtgactgcacgcctactgtgtgcatgttctcttggagaaggccactgggaaccccttttgcagtgcggtcaccaaggctagctccagagcccctggggggaggttggagagccaagccccgcccaccacagccccgccccgccctcacccgtgttgaaatagtagcccttgttctctaggcccagggtccacacgccctgtgggttctcatcccagaagtgggtggacatgaagacccagttgttgtagccttcagtgctgacgtccaagggtctgggacagaagggtgggtgggggtgggggtgtcaagagggatggctttgtgaagccggcagagccccatgaagtgtctgaccgcacgcgctggtggccgcgtgtcctctgggtgtgggtgagggtgtgactcggggtcccaccaactaggctgccgtgtgactcctatgggcctggcccctccccgtgaggacactccgggtagatggcagcgtttaccgacagggcatgaggccgccccctctcctctgcgggccgctcaccgtatggccacgagtgtggagcgcgtgcccatggggctggtgagcgagatctccaggtctccgcgccggctgtaggacagcgtcagctgcgcctgcacgtgctccagcgagcggatggagttgtggaggccggcgcaggccgatacgttttccctgatgtagatcagcggcaggatggggctgagggggtcgaggggtgaggaccctcctgcggcctgctggggggtgggtgggcggccagcaggcgaggtcggggctcagaggtcacggggtccagccctcgttttacagatgggtaaactgaggcctcaggcctgtcccccacacccccagcggggatagcggaggggcgcgcaggggtctcacgtggggcggctctggacccggacggcgcacttcctctgcggctgggtgggcagccaggtgcgggcggtgtccaccagcagcccggcgtccagcagcccgtatccgtagtgatggctcactgcgcggaagggcagcagtcactcgccccgtgggccccgggtccccgcccccgcccggccccgccgcaccttggcgccccacgccgttggtcctccagtcctcggcctgcaggtgcgccggcttggacgcgcggaccaccaggtgctgcatgtctctccacgtcaggaacgggctgcggggggcgggggcgggggcgggtgagccgccgggccgcgcctgggggcgagggcggtggaccgggccccgcagtcacctacttggcctccagcgctagggcgatcatgccggccgccagtggggctgaggccgaggtgcccgtgtgctggtctgtgcacccgtgatgcaggtccgtggtgacctgagggcagaggggggtgggactcggggggccgtgcacagtgagaatacagcccttcttcaaaaagtaccaaggactgggcgggcgcagtggctcaggcctgtcatcccagcactttgggaggctgaggcgggcgtgttgtctgaggtcaggagttcaagaccagcctggtcaacatagtgaaaccccaactctacaaaaatacaaaaattagccaggcatggtggcgggcacctgtagttccagctactcgggaggctgacacaggagaatcacttgaacccgacaggcagaggttgcagtgagcggagatcacacccacgccactgcactccagcctgggcaacagagccagactctggattaaaaaaaaaaaagt[131 bp omitted]tgtctctactaaaaatacaaaaaaattacccgggtatggtggcggggcacctgtaatcccagctacttgggaggctgaggcaagacaatcacttgaacctaggaggcagaggttgcagtgagccaagatcacaccgttgcactccagcctgggcaacatggcaagactccatctcaaaaaaataaaaaaatagtaccaagaactgaagtcaaaaagtaccaaggactggccacacagtggctcacgcctgtagtcccaacactttgggaggctgaggcgggcagattgtttgagctcaggagtttgagaccagcttgtggcaacatggtgaaaccccgtctctacaggaaaaatacaagaattagctgggtgtggtagtgtgcacctgtaatcccagctactcaggaggctgaggcaggaggatcgcttgagcctgggaggtagaggttgcagtgagctaagattgcaccactgcactccaacctgggtgacagagtgagactctgtctcaaaaaaatttaaaaaaaaaggtaccaaggactccaaggactgagttcaagaagtaacaaggactatgctcaaaaagaactaagagcctggccaacatggtgaaaccccgtctctactgaaaatacaaaaaaattagccgggcatggtggcgtggcctgctattcccggcactttgggaggccgaggctggtggatcgcttgacctgaggagttggagaccagcctggccaacatggtgaaatgccatctctacaaaatatacaaaagaaattagcaggacatggtggcatgcttgtggtctcagctgctcaagaggctgaggcacaagaatcgcttgagcccggcaggcgtaggttgcagtgagctgagatcatgccacttcactctgttgcacccagcctgggtgacagagc[131 bp omitted]aaaccctgtctctactgaaaatacaaaaaattagccgggcatggtggcgggcacctgtagtcccagctactcaggaggctgaggaaggagaatggtgtgaacccgggaggcggagcttgcagtgagctgagatcgcgccactgcactccagcctggacgacagagccagactccatcttcaaaaacaaacaaatgaaaagaaaccctgggctgaagtgattctcccactttggcctcccaaagtgagctgttgcgcccggctggatttgtttttgttttgttttgttttgttttgttttgagacagggtctcgctctgtggcctaaactggagtgcagtggtgcaatcttggctcactgcaacctccatctctggggttcaagcgattctcctgcctcagcctcctgagtagctgggattacaggcgcccgccaccatgcctggctaatttttttttgtatttttagtagagatggggttttgccatgttggctaggctggtcctgaactcttgacctcaggtgatccacccaccttggtctcccaaagtgctgggattacaggcgcgagccactgtgcttggcctggatttgggttattgattgattgattgattgatttttgagacggagtctcactctgtcgcccaggctggagtgcagtggcccgatctcggctcactgcaaaccctgcctcccgggttcatgccattctcctgcctc[214 bp omitted]ttcaccatgttagccaggatggtcttgatctcctgaccttgtgatctgcctgccttagcctcccaaagtgctgggattacaggtgtgagccaccgtgctcggcctggatttgcattttcaaagcagctttgggagggtgctaagtcacagtggtggggacaggaggaggccaggctgggatggcagggcctggggaggggaccctgttggggcggctgcactcacgatctgggggtcggtggccacgccgctgctgtaggtggtggtgagggtggaggcgcaggcttcgctgtaccagggcacgcggccctgctgggtggtgctgcccacggaaagcgtgtggatgctgttggtgtagccgtcgcagttgcagttgtcgtagtgcaggccgccgttgcccgaggcccagatgaagagcgtgcccagcccgccgcggccctgggaaaccaggaggggcggggagggggcgtcggcctggcctgccacccctgccctcctcgggctgccactcaccttggtcacaccacgccggaaggcctcgcgggtgaggatgccggggccgtccaccgtgcggccgtcgtcctcgggaccccagctggcgctgtaaatgtggatgtgctgcggctgcaggctcagcgactgggcctcgatgacatcggtgatggtaccgtccagcatccgtacgcctgcagagccagggcgggagggccgctgccaccggccctgcccttccccacaccccagcccgccccgcgccactccacaccactccccagccctacctgggccctctctctgctccctggagtgggaccattcgtattggctcagcaccccccaagccctggagtctggggccctagcaccacccagcagtgagagggtgggctcccgagtccttgggcccagctccccgccagagtcacccccttccctctctgtcccggaatggtgccgctgggggaccccgggtacctccgattcgggcgttgaaagcgacccccacaccacagaagccattgttggccatcgcggccacctccccagcacagcgggtcccgtgcctggtgccagggccaagaggggctcctgtcacggcctccatccccctgccgggtactggggcttcccccgtgtgctgtgggagccctgctcaccggttctctttgctgggggtgtagcggggctgggggtccgggtcgtagtcattgaagtcatagctggccagggggtcctgggggcaggtggggatatgagggggccgggaggcgtccctagggtggtgccagcctcggcacctggggcagccctcgcccacagccacccgcggtctcacgtagttggcccagaggtccgggtggtccttctcgatgccatcgtccagcacagagaccacgatgccctggcctgacagcccctgactccaggcctgcaggatgctcaggtctggttgggcctcgctgttctgcagggggaggcggggttgtgaccctgtgagggcctggagttgagggcgccagcggccccgtccccgtctacccaccctggctgcctgctcaccatgtaccactgcttggagaaccaggggtccgtgggcaccacgacagagcgtttcacccgccgctgcagcgtctgctgctggaaccactgcacctgcagagcagagggtgcatcaggcctgtcccctgctcgcccctggggcccctcgtggttcagggagtgaggcagccccgtgccctgggaccctgtgtttgtgggggttgctctccagggtccccatgtgcctggggctctgtctgcagtcggaaggggtcgaggcttttggaccacctgtccttgggcccacagacgcgtcgttgctgccgcgggtgactgcaggtccccgggtccccaccccactctctcccccatccctgttctagatccttctatctctctcctgcatcacttccttattttttttctttttttgagacagagtcttgttctgtcgcccaggctggggtgcagtggcgcaatcttggctcactgcaacctctgcctcctgggttcaagcgattctcctacctcagcctcccaagtagctgggactacaggcgcacaccaccatgcccggctaatttttgtacatttagtagagatggggtttcgccatgttgatcaggctggtctcgaactcctgagcttaagtgatctgcctgccttggcctcccgaagtgccgggattacaggcatgaaccaccacgccaggcctggcttctctcttgcaaaccacatcaggaactggccactgctctccctcccggtgctgtaagcaggcagctgtccagtcctgttcaaggcacttcctggcctccgagggcttcccaggctccatcccaacccctcagcttgacatcccaggcattttctagacagggcccagcccgatgggacccaggcccctttctgagcgcctggacactgcgtcctgagggc[132 bp omitted]tctcctgcctaagcctcctgaatagctgggactacaggcgcctgccaccatgcccggctaatttttttgtattttcagtagagacagggtttcaccgtg[139 bp omitted]cccttccctccatcccatgacctagacggtggggaagtcacgccgtctgtccctccttaccagagcccctggggcccagaggagggagggggaggacaagaggtgcccactgtgtaccaggccctggcaggcgccatgatttccgtatctgggtcttcctgcctcctcttgctgtatagacttggggcccgggcgggtctgagccacagaaagcacacagctgttcataacaaccacgagaaccacagaagatggctggtggccccaggaggcagctgagaccccgggcagggggttggcctccaggccaggctcaccttggggtttttcttcaggtgcaggcggtggccccagtgcggggtcagggactgctggaccacgccccggtgccgcaggtgaaagtactgcccgtcagggaagatctggggatgtggggaagcggccgcaccgatgggacccggctcccctgctgaagcccccgagggccggtaacagcccccttctttgtccttccccagcaggtgctctctgggagtcccagaagctgagcttggctgaggcaggggtgggctgggactcttgatatttagaagaccttgtgggctccctcccccttgtcggggtctagggttgttcagtcccctccaagcccccacttcccgtctatcccggtcccacccaccggccccaggttgacgaagccgaatttgcgtgccaggcgctcgacctcccggttaccctgggacacctggacggcccagctgctgacatagatgggggctcggaccggggcccaccccacagcccgggggcggacaagggccagggccaagaccaggcgcagccacagcgcaatcggggcgggccgcatggaggcggggcgggagcggggcctgcgcaaatcccctccctcccgccaaaccgccgagtgggcccaggcgtccgacccgcccccggcgccatagcaacgcagaaggcttcgactcccagggggccttgcggctactcagccaggaggggcgcgaagatctaacagaagcgggagagggacgcacgcctgcccgtcttccgcagacccacaccctcgggagcctcagttttcccatttgtacaacgacaagactaacccagagaagcgggttcactgttgcgataacgcgtcctaccctttgtttgacctctcccactttccaacacacccctccttcgagaatcagcccggcctcctgtccggcctaatcagaatcattcttttgcgtaatcccgcctcctccgataagcctcgccccgttcccgcccctaccattccgccctgcctcctttgtgatcagccccgccctccactggtctcgccaatgaatcgcgtcccgtttctccaatcggctcggatgtttctttagcccctccccccggttccgcccccccacgcctctcctcgccctggctccacccttcagccaataatcccatcctctgacaccgcccttccaatcagctacgtctcgctccggcccggccaatcggtgccctgggccgccgcgccccgccctctcccggcggggtctgggcagcggcggccgtggcggagggctatgcggcgggggagacggggcaggcccctcctcctttgtccgccctgccctcccattggtcctagcggggggccgggggcggacaccggcgcggggccggagcatcgcggctcaggctgcgggaaagcggtgcgcgtgcagcggggtgggtgccctggtccgcgggcgagctcgagcagccaaccccgggcgcgtcggggccatggacggcctgaggcagcgcgtggagcacttcctggagcaaaggaacctggtcaccgaagtgctgggggcgctggaggccaagaccggggtggagaagcggtatctggctgcaggtgagccgtcggcgctagcccgtttcgccgacgggcacaccgaggccatgggcctgggggtcgcagaccggactccttccccggctacggggtccggtccggccggtggagcgcgcgaggtgactgggacctcgaggtccgcccgcagcccttcccttgcccgcgccctgcgaccctgctcccgggccacccctctctagcttccgcccctggccgccccccgacgcctccttccgggcgctgggtgcctgccatgccgaagtccggttcttccagttgcccagtggccccagaggggtcgggatgccagtgtcctgcgcgtttcgccgtcccccttcccccgtggaccccggcctggctgcaacagtagagatcttcccgtttttctgaggggaggctcctggcgggaaggggaacggaccgtcctgggggcctgcccaggacccttctcctttcctcctcctctcctgccctagctcaccttcccccagctcaatggcttagtgccaccgagcgtaaatgtttgttaagacggagttgggttgtctgacggctgtgatgtggggaggctggactggggcccacagagccggagatccaggcaccccgattgtgactccattacagttcttccgtgactttcacccttggtgacgctgcgcgccccttcccctttccaaatctctagcaagagcatgtagtaaacgctccttaaatgcctccctccccacctttaaaacttttttttgagaccgagtcttgctctgctgcccaggctggagtgcagtggtgtgatcttggctcactgcaacctccacctcctgggttcaagcgattctcctgcctcagtctaccaagtagctgggattacaggtacccaccaccatgcccggctaacttttgtatttttagccgttcaacatggtgaaacggggtttcaccatgttggccaggctggtcttgaactcctggcctcaggtgatctgcccacctcggcctcccaaactgctgggattacaggcatgagccaccttgcctggcctaaaactttttaaaattaacttttttaagagacagggtctcactatgttacccagactagtcttaaacttctgggctcaagcgatcctcctgcctcagcctcccaaagctctgggattacaggtggaagccactgcacccagcctttcttccgtttgtgtggtgctcccagccccactggctctgccttctcttccaggaagctccgcagaatgactcacaaggacttgctctgggcctggggtattctgggtagaggacagtgccacttttttgagcaccttctgcaggtggatcccaggagtccagttcccccccaattttcccaccatctgggggttcccatgccaggcagcgccagaacagtctgaagtctgtgcccacaccctggaggtccccaggtgcctggtcccatgtgcagcgcagcaggtggcatgggcatggcccggctgtgcctgcccccgggagcaggtccctgacctctgccctccctttccacatccctggggctagtgggcaggaatttaggtcgtagagcgcccaggaggcaggcagcagggaggggctgcctggggcaccgtgtcaccagagacgaaactgaggcacagggaggcaggggctgcctctgtgcctgttctgtctgaagcatacagtcctccaccctgcccacccccagtcccatctgctgctaatcttgggggctgggcctccctccacagttctgatgtccaaggtcatcctcccgtcgctgaagctgcaggaaaagggatttaggggagggacgccctgggagagtcattcctccccacgagccaggcccggggagagatggcagtccctcatccccatctcccacctcctttaaattgacaaatcccacacccctgggtaacatacgaagaaactcagaggggacagtgactgggaggccactcctgggaccagctgggggactcctcctacccctgaccttgggtgcttttggataaagactaaagcaggtgggaggggctggggggacttgggcctctgccctttggtccagaagtggcctctatctcactctgcagatagcagccccaggggaggaggaagaaggctgtccaagctctctggagcacataggttccctgtgtgaccttgggcaacacccacccacccccagttttggctgttgaataattcaggaaaagcacaaaacctggcacacaataggcgcttaataaatgcagctgtcgtagtcattcttttcagagccaggttcaggattggggctgagctggacacacacacacacacacacacacgtttttctctgaacaccctccttgctgggactgtgttatagttgcctgaaggcacttaataaatgtgcagaaaggctgatggcggtggctcacgcctgtaatcccagcagtttgggaggcca[134 bp omitted]aatcacttgagcctgggaggcgagcttgtagtgacctgagattgcgccactgcactccagcctgggtgacagagcaagactccatctcgaaaataaatagaaataaacgtgcagaaaggcgttctctctgttaacttgtaaccataggaggcaggggccattactactcccacttaccaagggggaaactgaggctccatgcagccacagcctcactcagtgccggctggtgagtgcacacccgaccaaagggctctcctccacccaggggatcgagatgctggggtttgctgcctccaagacaggaggttctcaaagggggtagccctgccccccaccccgccccaggggacactgggtgatgtctggagatacctgtagtcgtcatgacttgggggctgatggcatggagtgggcagaggccagggacactgctcagcaccctgcagtgtccaggacagccacttccccctctccaccgaaaacaaccaagaatgacccggccctgaacatcagcagtgccaaggcagagaaaccctgcgctaagataacagatgaaacagttgcctttctcagctctagaatcaagtcttcatgacagcctggcctcccttgcaggtttctgccatcccttatattgaaacactggcctgttttcccagtgcctcccaaagggcctggaatgagatggctatcgttgcagattacacttttttttttttgagacggagcctcacccaggctggagtgcaacggcgcgatcttggctcactgcaagctccgcctcctgggtttacgccattctcctgcctcagcctccccagcagctgggactacaggcacacaccgccatgcctggctaatcttttgtatttttagtagagatggggtttcaccgtgttagccaggatggtctccatctcctgacctcgtgatccacctgcctcggcctcccaaagtgctggggttacaggtgtgagccaccgcgcccggctgcaaacacttcactgggcagctattccgcacccacccccactgcccagcgtcgagctcctgcctgcccttggggagctctcaaccccggtgggggacatggacacgttgaccagttacaggcacaaggctcagggcctagaggcacgatgggggatgtacaggcacatcaggggcagtggacatatcctggaggcggctcctgggaggaggtgacggttgcagtcttcgtcgactgaaaggcggcctgggtaccgtcgtgggggctcagcgggtccccagccctggcacaccaccgcctctctccggcaggagccgtcactctgctaagcctgtatctgctgttcggctacggagcgtctctgctgtgcaatctcatcggatttgtgtaccccgcatatgcctcgtgagtgcacggctggctgcccacgcggggggttctgggggctccctggcagcccctgaccctgctgcaccctccctgcagaatcaaagctatcgagagcccaagcaaggacgacgacactgtgtggctcacctactgggtggtgtacgccctgtttgggctggccgagttcttcagcgatctactcctgtcctggttccctttctactacgtgggcaaggtgggccctgccagggcgggcacagccgtggagcgcatggggcttggggattcctgggaggcgctggggccagaaagtccggaggataccaggagatgggggatgtgaggggaagactcagtcccttccctggggaaacgagccctgtccgggggctgatggtggagggcccaccctgaagggtgtctgatggtggagacccaagcctgctccaataggatgtccgatggtggagggctcaccctacaggatgtctgatggtggagggcccaccctgaagggtgtctgatggtggagacccaagcctgctcaaataggatgtctgatggtggagggctcacttaaagggtgtctgatggtggagacccaggcttattccaataatatgtctgatggcacagggcccacccctaaagtgtgtctgacggtggagacccaggcctgtcccagtaggacgtctgatggtggagggctcactctagagggtatctgatggcgaaaacccaggcccatcccaataggacgtctgatggtggcgggcccaccctaaagggtgtctgatggtggagacccagtgcctgtccaggatgggcatctggtggagtggtgcagcccctctccccaccaggggcacagagctgggtgggcccgcgtgtaactcctgccccgccctgcagtgcgccttcctgttgttctgcatggctcccaggccctggaacggggctctcatgctgtatcagcgcgtcgtgcgtccgctgttcctaaggcaccacggggccgtagacagaatcatgaacgacctcagcgggcgagccctggacgcggcggccggaataaccaggaacggtgggtgctcgcaggcgcctggctgcctcaggccatctcccgggtctggacctgtctctctccaccttgcctccctttctgactttggccgccccctctcactgtccgcctctctctctcacgcttccgggaaccagtcttgcaggtcctggcccgtagccgggcaggcatcaccccggtggctgtggccgggccctccactcccctggaagctgaccgtacgtaaccgctgtggggagataggagctgtgtgtgtgtgtgtgtgcgcgcgcgcgcgcgtgtgtttgagcgtatgtttgctgtgtgcacatgtattattgtgtgtgcatgttttgtcatgtgcaagagggtgcgtgtgcatgggctcaagtgtatgtttggtgtgtgagtgagcaagggagtgagcatgttttctcacgtgtgcatatgtgtgtgtgtgcccacgtgtgcatgtgagtatatgtgtgtgcgtgtgaccatgtgtgcacgtgtgagtgcgtgcgtgtgcatgactgcacatgcgtgtgctctgtgtgcacccatctgtgcatgggtgaccatgaaagcctctgtgtggttgacaccatctctgctgagggtggctgcccggcccctcgacttgtcatgctcatagccagtagcctcagtcccgcctgcgagcagctccggggagcccaggcctgcctcacggccctcccccacccgcccctctctctgcagtcaagccaagccagaccccgcagccgaaggacaagtgaagcagccccctgagcctcacaaggacctcctggctggtgaggagggggccgcgccaggctcccaggcctccacagagtcttcagcgcatcccccaacagcagcccctgccagtccctcgggtccaggcaaggccctgggggtctccttaaatgccacctcgggcaagtcccagtcccagtcctcggccacccccagctctggatcccagggccagctgccctctggctctggctgtggctcccgcctgtccggcagggcccagggccagcgtcgggcacagggcagctcccactggtctcggcaacacacccagccgcctggtacttcctccagcccctcccagtcagccctcccgtcctcggggcccctgcagccacccaacgtcacctccagcccggtctcacccatggtccagtctcccagcagcagcaacatccccacgcagccccccagcaagtcctctggcaagccggaggacgcagcccccaagaccagcggacagcgccagaaggaatcgtcgaaacagcctgccagcagcgcctcagtgcccgagctggtcccctgccattccgggacctctctggagtacacttcggagtccaccaccgagatcacctgcagctggccacaccacaggcccccgtgcctgcagcactactggtgcctgaaacacctggcctgctaggaggctccaataaagctaacccggaccagacctgtgtgccacgtgtgcggggggcccaggggaggggctgcgagggcaccgtcccatttcatcaggcatgaatcccggctgtgccgaccagccccataatatagatgaggagactgaggcccagaggctaattcacccactcaaggtccacccacatggccaggatgggtgcaagccccggaaaagcttgtccttaatcacagtgctttctctcctccctcccgaactagttgtctggcctatttgcattagcctgcttctcttaaaactcccccatttgggtgcggtggctcacacctgtaatcccagcactttgggaggctgaggcaggtggatcacctgaggtcaggggtttaaaaccagcctgggcaaaatggtgaagccccatctctactaaaaatacaaaaattagccaggcatggtggtacatgcctgtaatcccagctacctgggaggatgaggcatgagaattgcttgaacccaggaggcagaagttgcagtcagctgagattgcgccactgcactccagcctgggcaacaaatgaaactccatctccaaaaaaaaaaaaaaaaaaaaaagtgagtaggataaaccacaaaccctgatatattttcccaaggggccataactcagttattctcaacccagaacagttttgtcccccggcctttgggtcttgtctggagacacttttttttttttttattgatcattcttgggtgtttctcacagagggggatttggcagggtcataggacaatagtggagggagggtcagcagataaacaagtgaacaaaggtctctggctttcctaggcagaggaccctgcggccttccgcagtgtttgtgtccctgggtacttgagattagggagtggtgatgactcttaacgagcatgctgccttcaagcatctgtttaacaaagcacatcttgcaccacccttaatccatttaaccctgagtggacacagcacatgtttcagagagcacagggttgggggtagggtcactgatcaacaggatcacaaggcagaagaatttttcttagtacagaacaaaatgaaaagtctcccgtgtctacctctttctacacagacatggcaaccatccgatttctcaatcctttccgcgcctttcccccctttctattccacaaaaccgccactgtcatcatggcccgttctcaatgagctgttgggtacacctcccagacggggtggtggctgggcagaggggctcctcacttcccagtaggggcggccgggcagaggcgcccctcacctcccggacggggcggctggccgggcggggggctgacccccccacctccctcccggacgggtcgactggccgggcagaggggctcctcacttcccagtaggggcggccgggcagaggcgcccctcacctcccggacggggcggctggccgggcggggggctgaccccccaacctccctcccggacgggggcggctggccgggcggggggctgacccccccacctccctcccggacggggcggctggccagggtggggactgacccccacctccctcccagatggggtggctgccgggcagagacgctcctcacttcccagacggggtggctgccgggcggagggtctcctcacttctcagacggggcggctgggcagagacgctcctcacctcccagacggggtcgcggccgggcagaggcgctcctcacatcccagacggggcggcggggcagaggcgctccccacatcttagacgatgggcggccaggcagagacgctcctcacttcctagatgggatggcggccgggcagagacgctcctcactttccagactgggtagccaggcagaggggctcctcatgtcccagacgatgggcggccaggcagagatgctcctcacttcccagacggggtggcggccgggcagaggctgcaatcttggcactttgggaggccaaggcaggcggctgggaggtggaggttgtagtgagccgagatcacgccactgaactccagcctgggcaccattgagcactgagtgaaccagactccgtctgcaatcccggcacctcaggaggccgaggctggcagatcactcgcagttcggagctggaggccagcccagccaacacagcgaaaccccgtctccaaagaccttgtctccaaaagaaaaacagtggtcagtcaggcatggtggctcacacctgtaatccccagcaccttgggaggccaaagcaggtgaatgacctgaggtcaggagttcgagaccagcctggccaacatggtgaaacactgtctctacttaaaaatacagtaattagccaggcgtggtgggacatgcctgtagtcccagctacttgggaggctgaggcaagagaatcacttgagcctgggaggcagaggttgccgtgagtggagatggtgccattgcactccagcctgggcgacagagtgaaactccatctcaagaaaataaaaataaaaaggctgggtgcggtggctcacgcctgtaatcctagcactttgggaggccgaggtgggtgaatcacgaggtcaggagattgagaccatctcggccaacatggtgaaaccccgtctctactaaaatacaaaaaattagctgggcatggtggcgtgtgtctgtaatcccagctacttcggaggctgatgcaggggaatcgcttgaacccgggaggcggaggttgcagtgagccaagatagcaccattgtactccagcctggcaacagagcaagactctttctgaaaaaaaaaaaaaaaaaaagagtgttccaggcagagggcacagcctgtgcaaaggccttgaggcaggaccacgctggtgagtgggaggcacagagaggaggctcctgtggctggagcagagaaggggaggagggaggaggggaggagggaggagggaggaggggaggggggaggaggggagttttcggggctgcaccacacaggcactgggggcggggggtgcactttgtcttttttttttgagacagagtttcactcttgttgcccaggctggagtgcaatggtgggatctcagctcaccgcaacctctgcctcctgggttcaagcaattctcctgcctccacctcccgagtagctaggattacaggcatgcgccaccacacccagctaattttgtatttttagtagagacagggtttctccatgtccgtcaggctgttctcaaactcccaaactcaggtgatccacctgccttggcctcccaaagtgctgggatgacaggtgtgagccactgtgctcggcccgggactttgtcttttactcggggtgaaggatttatcagagcaaagggcaagggtaatcattaatcaccccccaccctgtgtcggtgatcacacggggatggcagacggggctctcagaatctgccgatcactggcccagctggtttgaagaatgtggtctggtcatggccctgagggaggagagagggtgccaggctcgctctgcacctggcatggtccctcactttcactggcggggagcagcaaaactggctctggcctgcccaggtcagcacacccagggagcacaggtggggaggaggacacacttgtcttaccaggtggaaatgtgacctttagcccctcaggcattttattttatttttattttgtattttttaaattttatgtttgagacggagcctcgctctgtcacccaggctggagtgcaatagtgcaatcttggctcactgcaacctctgcctcccgggttcaagtgattcttccacctcagcctccccagtagctgggattacaggcgcgcaccaccacgcccagctaatttttgtatttttagtagagacagggttttgccatgttggccaggctggtcttgaactcctgacctcaggtgatcctcctgcctcggccttccgaagtgttaggattacaggcgtgagccactgtgcccagctctttttatttatttacttttatttttattttctgagatggagtctctctctgtcccccaggctggagtgcagtggcacgatctcagctcactgcaacctccgcctcccgggttcacgccactctcctgcctcagcctcccaagtagcagggattacaggcatgcgccaccatgacctgctttt[172 bp omitted]tggagtgcaacaatgcaatcacagttcactgcagcctcgacctcctgggctcaagcaattctcctgccttagctttgcaaagtgttgggattataggcatgagccaccacag[133 bp omitted]aaaccctgtctctactaaaaatatacaattagccaggcgtggtggctgttgcctgtaatcctggctattcaggaggctgaggcaggagaattgcttgaacccgggaggtggaggttgcagtgagctgagattgcgccattgcactgcagcctgggtgacaagagcaaaactccatctcaaacaataaataaaaataaaaataaataaaagaaggaaagagtggcagccaggtgcagtgtctgacacctgtaatccagcgctttaggaggctgagacaggagattcgcttaaggccaggtattcaagcccagccttggcaacatagagagacaccatctctacaaaaaagaaaagaaaagaaaaattagccacacattgtggtatgcacctgtagtcctagctacaccagaggctgaggcaggaggatcactggagcccaggaggttgaggctgcagtgggctgtgaatgcgccgttgcaatccagcctgggagacacagtcagaccccggctctaaaaaaataaaaataacaaagataacaaaacgttcgcttgtcggctttaaagctaaagcgcaaatctggagactgtttattgccgatggttacgtggttctcactggaaacaatgttgtcattttcaaatcacgctggggtcctctcgcccacgcaggaatggcgtgctcctggcggtgggggctgtgggacacctggtgcgcgtttctcccagcgcctccgtgtttctccctggccgcaggcacagcctggggtccctgttgaggaaactctccgagtgtcagctcccctggccggttgcgcagcccctagggtaactgtctgagatccaggcgccggggcagcccagggggtccgtggccgggagagaccttgaaacctccattccctgggacaccccaaaccacagccggggagaagggacagccttacagactgacaggggagggagggcagtggggtgccggcaggcaccgacagtagcctcatgagccagtgctgtcacgaggaggcctgcgagagggccccgcgtccaatgggaagcgagtgcccacgcggaagtgggctcagggcacctggggccacaagccacgaggcgcgcccggagtcccttcatgtcccgtcctgccgccagggggcactgcggcccccactcatccctgcagcacccgcggcccttggctggggagcccctgggacccccgccggcagcgcgtgctgcagacatcaatcacagaaggcaccacgtcactgaagcgccaggcctgggccgtcccaggctccgctgggtccctggtatgccgtcggtgctcaataagcacttgctgcagaaatgtgtgaaggaaaaagggggctagggaagggctccaggaaagtgtaactcccatgtcagagctgggaggggcttcgagggcatcactcactgagcgggaaactgaggctggagaggggctgcacctggcctggggtcatctgcaagatcaggggccgtgtccaccaatgtcctgcaccccttgccgactccctctgcctcggccgcctccttgcccttcaccctctctggttgctccctgcctggtgggggtagcttgtccgtgcccagtggacagcggggacccatggaccccaggcaccccaggccccagggagaaatgcaaccactggtcccacacagagtgggttgtcccgggtggcagcatgagccatgcatcaggcgtcagaggcagagggttggcaccccacggaggagggtttgctgagcgacctcgtgacaccccctagtacacacacagcccgtgtcggccctcctggttgcagaagaacatagcgggctggcagctggcagacagcagcggctctcacctgcctcctcacctggggaggggttcccagggtgggcctgagaaagtatgtggcagttgggggaggctcaggacctaccaaagccccattcattccccacctgctcctatcctcctctattccctgccctcacctcacacagtgtcagacgtgcagggaggaggtgaggctggaccaggaggaggggtggggtgcgtgtgaacatgcgtgcctacccatgagcaaggtcgagacggggttctaccagcgtgtccctgagtctctgtgaccgagtgcatgtgactggggtgcttaaaaaaaaaaaaagtgctctgcagccataaaaaaggatgagttcatgtcctttgcagggacatggatgaagctagaagccatcattctcagcaaactcacacaggaacagaaaaccaaacaccacttgttctcactcacaagtgggagttgaacaatgagaacacatggacacagggaggggaacatcacacaccgggtcctttgtggggtgggggccgaggggagggagagcattagcacaaatacctaatgcatgtggggcttaaaacctagatgatgggttgatgggtgccacaaaccaccatggcacgtgtatactaatgtaataaacctgcacattctgtacacacccagaacttaaagtaaaatttttttttaaaaagtgcttgtaaaaattaaagaggaataaaaggggggtgaacagccagtacgatagtgcatgcctgaaattccagtgctttgggaggccgaggcaggaggatcgtttgaggccagtagttggagagcagtgtgggcaacgtagcaagaccccatctctacaaaaaatttaaaagttagccgggcatggtgattcacacctggagttccagctgctgtggaggctgaggtgggaggatcgcttgagcccaggaatttgaggctgcagtgagccatgattgcaccaccgcacttcagcctaggtgacagagcaagggtctacctcagaaaaaaaaaaaaaggaggagcaagcacgtgttgatgggtggaaatccagccagaaatgctgaggctgaaaagattgtctccgagtttcctggtagccaggggaaaaggggaaattggtacgttggtacgttacagtgcctggttaggcatgtcttctaaggggcatgcctgtttgtgacagtgtctctgcccttcacacatgagggtgtgtgtgagtagcagagagcagagacagcacagtgtctgggaagtaaacagatgatcttctgggtacccagggcagcagggtgtcatgctcgttcatgacagtgtctccaagcaagtgtgacgcgcgcaaagagaaagaaagcagcgttaaactttctgagtataaatagctatgagcttcctggcagccaaggagagaggcgaaataaaagtcagagtctccttagtgcctcctcaccagtgcctgccggcttgtgacagtggctttgactgcatgcagaggtgtcttaagcgtgtgtgggagggagtcacatagctgcacaggtgggacgtatttcagagctgcctggaagccagggtgagaggggaaatacgttgacgttgaggctggtcagatgtatctttcttgctgtgtgtggccggggctcctgcaggggctcagccaggacagcgccgggcagtcaggcgtatgcggctgtcctccgcagggctccagggccgggcgtagccggcgtggggcagcagcagctggtcctgtgtgccgtcggggctgacaagacgctggacagccatcaggtagtcccggtggggtgccagcatcgggcaggggcagtggcctggcgcccacacgtactcgcgtgcccgcagtggcgagcggttcttgtagacgagctggatgcgcacctcatagcgggtctcctgggcctggtggtggtggcccagcactcgggcctggaacactgttgaggggacgtgctaagctggctggctgctcaactctgcgcaaatctctacgccccctcccttgccagaagagggactgagggtcaggtgggacctcgggatctatagggactagagtcaggatcacgtcagggatcaatgagggattagggtcaagaggcaaattaggatcagaagaaggggtcaagggtaaagtcagattagggtcagaggtcaggaggaggccaggttagtaggggctaagtcagggtagaggtcgggggtctcaccaaagtcactgccgcaatagtggagtagtcggtgggcgcggccgcgggtgtcagggcagggtgggcaggggtctgtgggatgggcggtgctgtgaggggcacaggcctcagtccccactcatcccccaccctggctgtccccacctcacctggggccagcgttggggtctgtgcaggggtgacagcaggggctgcggggggctgaggctccaccccccggggctgaggctgcctcaggggccagcccagggcctgcacacgagcctggaaggggctgtagcgctcccgagggagccagaactcaaactcgatgccagggttgggctcctgcaggaggacctggagcaggggaggggacacagggagcttcacaggaggctggggttgcctcctgcctctgaccctacgaccccagcctccccactttgatcctgtctgcccccagcctccctcctctgatgctctgtccctagctgatcccctctgaccctgtccccaccctcccccctctgatgctctgtcccagcctctcccctctgaccccagactcccccttctggccccagtcacctccactcctaccctctgtccccagcctctcccctctgtccccagccgaccccctctgaccctgttggaggcccagtggcacctgtaggagcaggtcatgggaggtgggcccggctgcttgcaatgtctcctggggccctgtgtctcgggtgtagaccacatgcgtgccggccgcctcgtaggtccctggtgggctgaccacccagtgcccattaagcacgtagcgcccatcgccccccatcagtgctgcaagggaacagtcagccctcaggaacctgtcgtctcgtctcccagaccctggggtcccctcctcaggcctcagtctccccatctgtaaacagggacaaccgcccccgggtgcccagccgggtgcctctcgcctcacatcctaggatacccaggtggttgcggctcctgtgttccacgcggatgtgtctggcgccctcggggatcagggtcacgttccagtacccagcgaaggcacctgggtgggagggtaggagggtgttggggtgccagtgggggtgtatttgagcgatgacttgaggatttaatgagctactgcgggtaagacagctagccagggtcctgggaaccggaaaaccctccgtaaacgtttggagttacaattactattgcttcagtgtggcagggaaagggttaaaaccccatctgtcctggggaagggcgggacaatctgtcagtagccaatcaggatgaggagaaaggggggctgggccgcacactggccaatcagcacggaaatttgcttccgggccacggctcgttaaagggcccactctgacgtgtgtgcagggagggcggggcaggtagtcaccggcgtcacgaaacacgcgctgcacgaaaaggcacgagtcgttggcgcctccgcagcggccacagcggtcctcgagggcacccgagcccaacaacccatcacagccggcgctctaaagggtgaaggacaggcgcggcgtcactgacgctgggaggggcaggacctggggaaagggcagtgcctgggagcaagaggacgaggcctggagggaagatgggggtggagcctagggaggagcaggacctggcgggaggaggatgggcttggcgcccgggagtgggtgcctaaggggggctgggggcagggcctggaaggggagggggaaggcggtggagcctagggagggggtggaggctaatgggaggagggcggaggtggagcctaggatgggtggggcctgagtgggaggtgggcggggctcgggcggggcctgacgagtccttacaaggcagcggccagccacgcagaccccctgggcacccgggctgcaggcggtgccgtccaggacgcggccgaagctgtggtagaaggcgtgcccctcagccaggcagttgaggtcgcactggttgggcgctgagggcaggaggagtcggtgggccggggacccctgttcgagctccagtccccctctaccaagcttcatcaggcaaccatcactttgggcagatgaagcccagagatttggccaaagccacacatcgaggctgaggcagagccaggactggaccgtaggtgctctgcgtccagcaacctgggactcgcaggcaagtatcctggggctgcattcattcattcattcattcattcattgtctttatattaggagtccttacatattattcatttttaacaccattactcattcttcattccactgaacacctactgttttccagacactgttccaagctctaggatacagaagcaagaattcaatcagtgtgcagatggatggccttaaaaaaggccaggtgtggtgtctcatgcctgtaatcccagcacattgggaggctgaggtgggcagatctcctgaggccaggagttcaagaccagcctgggcaacatggcgagacccccccgtctctaccaaaaatacaacaataaaaatttagccaggcttggtggtgggagcctgtaatcccagctactccggaggctgaggcaggagaatcgcttgaaccagggaggtggaggctgtagtgagccaagatcatgccactgcactccagcctgggtgacagagcgagactccatctcaaaaaaaaaaaaaaaaaaaaaaaaagaagatctgagcatctggcccaggcaccagcaagtacccaatgaagtgtttgtccagtactgactggactgagtcccgcacaactgagctgtgtcgctggtcctccctgggcctcagtttccccttctgcctggaagtggggcaaaatgagctgtctgatcaaacacaaaggccgacagccctgatctccactcctccttctccagctccttctggctcccatttccctgagcctggctggtggaccctgcctggaacggatcctgggctggccctagtgggcctctgcgggggtgggatcacagcaggtttcctccaattctcagattgatggaaggaaggaagggagggagggagggagggagggaggaaggaagggaagggagaaagggaaggaagggaaggaagaaagggaaggaaggaaggaaatgaggttgatggatggcactttgtccattctaggcttttcttatatctgtgtctgccttccccatggcgtgtgaagctgcctgtctccctgaaatctggaggcgcactgacccgggcacgtagttatataactcgctattttcagctcaatgcagcaacatttcctgctactgggataagtttgagaagtgttggcctctggatacagctctaagtcaatccttagttgggtgttcagccctgtgcagaatgaaccctgcttccctctgcccctgtttcacgcctaacatatgctgtttctgtttcactaactcctacatatccttcaaagccctagcactaataccctcttctctttgcaaccctccaagaccctctccctgagactaatgagttgttcgctctggaccaattctgaccacaggagaccagactactcacccccatggaagggcacccactggtaggtcttctgggtgcccaggacagggcggccattgtacagggcacactgtaggtctcggaagggcacagcccctggggggcagtcctagggacagagataggtgagccagaggctgggacaaccccaaggggcaggtggtgggcttcaggcagtctggggtgggagagtggtctgggaggtgggcagggcttactggcaactggcagaggcggtactcatgggagtctccccagcacggttcttccccaggaagcctgaagggagacagagtgtggcgagaacccccagggaccccctcccagggctggccttccaccctccgcccccgccaaccccacccgcattccagcgggatcagggggattaaagggcacagcatgtgtgggcaggccgagggtgcggccaggggccgggctgggccggcgggggaggaggggcagggaccccctccgggccccgctcaccggaggcagcgccggctgcgcacagagacgccacgcccgcaggagctggagcagcgggtccaggacacccacggggtccactcgcccggaccctacttggggagacagaggcacggtcagccttgtagggggacgctggtgaccccacactgctgactgggtccccattcccactcgccaccccctgggctcatgcccccccttacctgagcactgacccccaaaccacagttcagcagggcccacaggaagagcaggaggttctggaagaggtggggcctggggaacagaggggccgagtccatagagccaccgccagagacacagggttgtgtcccggctctgccctgactggctgtgtgatcttggaaagtaactaaacctctctgagccctacctctcgtctctgaaaaacggggtaatagagcctcccttacaggaaagttgaggggtcctgtggatcaggtaaagaagacaggagacgtggagcccggtatggagaggaagaactca[133 bp omitted]gcctcagcatcccgagaagctaggattacaggtgcctgccaccacgccggactaatttttgccgttttagtggagacagggtttcaccatcttggccaggttggtctcaaccttctgacctgaagtgatccacctgctttggcctcccaaagtgctaggattataggcatgagccactgcacccagcctacaatattattgatatgtgtattgtgctataatgcagacagtaggtgcttaatcgatgcttgatgattggagggatcattcaaaaatagtacacaggtgcctcctagggctggggccccctccccgccctccccaccatcactgcttctacctttccgtgtggcctgaggccagccactccactctcccaggcctcagtttccccatctgtgcagtgggggccaagtggactcagtccatgattctgtgacaccctgcggaaggtgcggccggcaggggctggatcaggagttgggtccctagaagaggccctcagctgcaccccggccccagggctccctcagctcccagacagcagggagtcccccggattggggatgggacagggagggggtgacctggcccaggtccgttcggtgcctcatggcctcatcggcggagggggtgggactgagctccggggcagcccgtggagggaaggggccactgctgaggctggagcagggaaggggaggaggctgactgcctctctgggccttagtttctccatcctgtcagggcagggatgaagtcacttgccatccacaccctcctcatgaccccagcctgcagggggaaagaggggggaagggaagcagccgccaagtgagccagggcgtcctgctgccagcagagcctgaaggcaggtgggtgagccccggcccgggcaccagctggggaagaggctgggtcccacctggaccctgtttccctggctccagcatttggacttctgaggcaccaagggtctagggtcctgggtatctctaggtactgagacagctgtgtggtctgctgcatccgtgcccctctctgagcctagagcctgggctggc[148 bp omitted]atggtaaaaccccatctgtactaaaacacaaaaattagcccggtgtggtggtgcacacctgtaatcccagctacttgggaggctaaggcaggagaatcgcttgaacccaggaggcggaggttgcagtgagccgagatggggccaatgcactccagcctgggcgacatagtgagactcagtctcaaaaacaaccaaccaaccaaaaaaaacagggggagggggcttgaccttctgaccacccccaccggactctaagcctggtttgaggagtgggggtctaggtggtgaaaagtggggggctacaaggaccaccctaccccctcctcaatgggccctgcccagaatcaaggctctcccctccccgtgtgggctgcagcccggactggcggagggatctcaaggcaagccgcacctctgggcctcagtttcccccggagaaagtgggaggataggcagatggacttaccggctgcgcggagcccaggcagcgcgtcccggctccctgagcggccccagggcgagcggaagcggcggggcccaaggtgctgggcggggtggggagcctgggacggtccctcccaccgcggcctccgcaggcgcgcccaggcccgggtcaggaggggcggcggccccgggcgccctcgcgcggcgggcgcggatctgcggcaggggactgcccggcggacgcgagcgcaggggtcccggagccgcaggctggtgtcgggcgcccgggtccgggtgaccttggcaggctcgggcgggggcgcggcgcggggactgaccgccctcctctgccccggggctgctattccgggcgccgcgctcagggcccgggaatgtgcgcgaaccgaggtcaccccgccctgggtctgggagtcccgggcgctgcccctaccccgccgacgcccggattgcgtcccaccggcgtccccatccccggtcacagccccctcccctggtcctgcccctcacccctctcgcggggggtcgacctgctcgtggatggggaccctggcgcgcctgggctcccatccgggggttccccgacccaggtcccggtcacccccagcgcagggccccagcgcactggggagaggctcggccccgtgggccgcgcgcggggggcggagagaccctcccagctggcgcattcccgggcgctgctgtcaccaggggacgcgccccaccccgcctcccgccctccctgccgggccccggggctgccagcggggcttcagagccagacccgggtccaggcggtccctctccctcacagccgcggccacaccctctccggcctcagtttccccatcccagcagtgggcccggcagggatctccaccgcgaaccttccatctggaatccggctctgcgcggaccggcaacgcgagggggcaccccgggactccccccaccccaccctttcccgccgggcgtctgtgagccgccccgtgcccacccacgcagggatgagaccaggccctgggttctgggctccaccagtttctggtgtcgccccacggcgccccctggcgggcgggctgagggactggggcactaaaggagggggtggagggactgtcctgctccctgggctccacccaggctcggtctgagcaccccctcctccaggaagcccaccctgctgtcccacagcgctgaccacagggagagaggtttgctggggacatacagggtgttgctggtccaactcagtctgccctccagcctgtagcatgtcagcagagccacccatatgccatttattgagcacctactgtgtgcacagctgtgaacaacccagccagtcccaggccagcgggtaaggcagccccctggaatgtatgaccccccaccttctgacctggactattggagaaaatagcccaggcccaccactgatggccccaggttggggggtggtggttgcggggatgtcaagaaggccctcactgaaggggtcaagagagaagggcaggccgggcgcggcgcctcatgcctggaatcccagcactgtgggaggccgaggcaggcggatcacctgaggtcaggagtttgaagccagcttggacaacatggtgaaacccagtatctactaaaaatataaaacttagccaggcatggcggtgagtgcctgtaatcccagctactcggaagactgaggcacgagaatcgcttaaacccgggaggcagaggtggcagtgagccgagatcacgccactgcactccagcctgggagacaggcgagactccgtctcaaaaaaaaaaaaaaaaaaaaaaaaggaaagaaagaaagaaagaagtcagctcaggacatgtgtcaatgtgtcattaggacaattgtatcctcctcagatgtgccccattcccagatgtccagtccacagagctccactgggagtgcagacagcaggccctgtgccccgcagggaaggtatacagaaagcacagcgcccacagggagcacacacagcaggcattatgctctgcaggaagggtatacagcaggtgctgcatcttgtagaaatgcatagagtagactctgccctgcaaaggagtgtatacagtagatatggcaccttcagaggagtgcatacagcagtcactgcatcctgtagagagtatatacagcaggtgctgcatcctgcaaggaaggtatacagcaggtgctgcatcctgcaaggaaggtatacataaggcgctgtctcctgcagggagcgcatacagtaggcactgagttctatggaaagtgtaccccgcagcccctgttccctcctgggagtgcataccgcagccactgcaccctgcgtgggggctctagagctggcaagattggcagaggtggtggtgaagatgtggagggctgccccccacccccagttcttgtcccctaccgtctcccacctctgtcctctggatgtccctaggaggaggctgggagctcagcctaagacacccggtgtaggtggagggggtggctgctgaggctcagaggctcctggggtcccagttgggcggggtcccagcttactacattcccctgcccttgcctggaccctgacccaggaatcagccgagtccccctactctgaatttcagcctggaccccctccttgaggcagcgtcagggctagaggggagactgagacgcgggtcccggcggatgtggatcaattaggttccatttccttcatggttgtatggccttgaggcttaaggaatgccgcgatctgctgtgtgactgggctacagtgaacagtatggtaccccacacttcaaactgtgttcacagggtagatttcatggtaagggttcttaccataaaagaacaaaaacagtgggacacaagggacctcgggaagtgacaggtaggcctgtcatcttgagtgt[134 bp omitted]ccagcaaggtgaaaccccgtctctactaaaaatgcaaaacctaggacacggtggtcccaggatacctcaacctcctgcgtggactgggtggggcctccccatccctgccccacagacccctggaccccccggtccctggggctgtccgtctgttcctgggcaccagcaggggccacgcagagttgggaccctccccggctggagtcaccccatgggactcagggccctggaccctccttggccgctgctcgcccggtcctcattctgtgccggtttcttgtgcacgctcggaatctgttccctgcaggcacccagtgccccgggcaccgtccagaattcctggaagagacctcttgctttcttaccccactgcccaggctccaggcctgtgacatggcctccccagggtgccccttcccctccaccttcacgtgctgaaaaccacctgttctgtcactttcaggcgacgtggatcaggtggactggcccacctcctccattgtgtatgacgtaacccatgcttggccaaacagataattccatctcctagagacggggattggctgggggatgaccatgtgacccaagtgggccaatgagagcctgccctgggacttgaactgggccattagaggaaaaggtggtttcccgtggctggggtgggctccagggatggcgtgagttgaggtaggctggactttcttgactgctcgaagagatgcactgtctcaagcagatgctgacagacggcagcaaatggaaggggccagatttcttttttttctttttatctttctgtccttttctttctttttttacttttttttgagacagggtcttgctctgtcgctcaggctggggtgcagtggtgcaatcacagctcactgcagccttgacctcctgggctcaagcgatcctcccacctcagcctcccatgtagctgggactacagatgcatgccatcacatctggctaatttttttgatctttagtagtgacaggatcttgctatgttgtcccgacccaggctggtctcaaactcctgggctcaagagatgctcctacctcagccttccaagtagctgggactacagacatgcatcaccatgcctggctaatttttatattttttgtagagttgggggtctccccctgttgcccaggctggtctcgaactcctgaactcaagtgattctcttgcctcagcctcccacactgctgagattgcaggcatgtgccacccaccgtgcccagcccaaaagtctagatttctgagaaggttgtttgagttcctggattgagcctcatctgaaggcattcatccattttttttcactttagcaatttttagtttcttactttttttttttttttttgccagggtctcgctctgtcatccaggctgtactgcagtggtgcgatcttggctaactgcaacctctgcttcccaggctcaggcaatcctctgggatcagcctcccaagtagctcggactacaggtgagtgccattatacccagctaatttttgtatttttagtagaggtggagttttgccacgttgcccaggctggtctcaaactcctgagttcaagtgatcctcccaccttggcctcccaaaatgctgggattacaggtatgagccactgttcccaaccttattttagaatttttaaaaaatttttattattatagagacaaggtttcaggaacgaaactccgtctcaaaaaaaaaaaaggtgataacaattactatttcatgattattgactaaattccaaatgttattttatttggatttggatttcaccaggcttgtttttttgttttttttttttttttcagatggagtcttgctctgtctcccaggctagagtgcagtggcgtgatctcggctcactgcaagctctgcctcctgggttcacgccattctcctgactcagcctcccaagtagctgggattacaggtgtgtgccaccacgcctggctaaatttttgtattttcagtagagacagggttt[133 bp omitted]ttctgttcctggattccataagacattgaactatttgtctcataattagtaaaaagacccatgcagattaaaaatggattatttctgtggtaatcgggtgggttctgatgcccatgcagcaccttgaacacggctggagttgatgagtatccctgatgggaagtcgatgctgcgtccatggagagaaggggcacggggttgagtgtccacccagcacctaatggagatacagaccctctccctgccactggcgctccctgtcaggtgggacagacaccagcaagctagcaaggaaaccatcattctgggttgtggtggaactggggagaagcaggcatggatcacgtctagggcatcttggggcaggggcggcctcctgggcacaggtggccctttcctgcctgggcctaaaagctaagaagaggatgccaggcaaagtctgggagggtggcagagggaacagcacatgcaaaggccctgtggcagggtgagcttggtgtgcgtctgaggacaaatgggaaggccagaaggttgatgtcttggccttgtgtcctcatcttgggtggtcaactctggggaatgttgtattcagttcctcagagggtgcctgatgagtgtgggactcagggtgccccgggggtacccagctcccaccctgctccctgaaccaactctctgcactaaagccttgcttcaggctctgcctttgggggaacccacacagatgggccaggagggttgagtaacctgccccagctgccagtgctaaagccacccacctggacaatgtcagtggaggaagtgaagagagtgggtgagaggccccaacactgaaccccaggctcccaggagaaggaggaggtggcttaaaggagaactggaaaaatgcatccagaaagatgggaaggggccaggcgcggtggctcacacctgtaatcccagcactttgggaggctgaggtgggtggattacctgaggttgagaggtcgagaccagcctgaccaacatggagaaatccggtctctactaaaaacacaaaattagctggatgtggtggtgcatgactgtaatcccagctactcagaaggctgaggcaggaaaatcatttgaacccgggaagcacaggttgtgctgagccgagattgcgccattgcactccagcctgggcaacaagagcaaaactccatctgaaaaaaaaaaaaaaaaaagatgggaaaacatcaggagcaggggtgtcccagaggacaagagaggacggtgcttttattattattatttttttttttaattttttttttgagagagagtctcgctctgtctcccaggctggagtgcagtggcacaatctcggctcactgcaagctccgcctcccgggttcacgccattctcctgcctcagcctcccgagtagctgggactacagccgcccgccaccacacccggctaattttttgtgtttttagtagagacggggtttcacagtgttagccaggatggtctcgatctccttacctcgtgctccacccgccgtggcctcccaaagtgctgggattacaaacctgagccaccacgcccggccacttttattattaattattattattattgtttttgagacagggtcctgctctgtcacccaggctggagtgcagtggtgccatcacagctcactgcagcctcaacctcctgggctcaagcaatcctcccacctcagcctcccaagtagctgagaccacaggcgtgcaccactccacccggctaactgtttattttttgtagagaaggggatctcgctgtgttgcccaggctagtctcaaactcctggactcaagggatcctcctgcctcagcctttcgagtagagtagctgggattacaggcatgagccctgcatctggacaacagtgcttttaggaggaaacagagttgagagagggaagaacagggcttggtttcggggcaccaagtctggacgccccctcctgcgctcacactgggccatgtcgtgcagcataaaccacaatcagtgggggtctctggagccctgtggtggtggtacgtctcctgcctgctctgctcccagggccatgggtccctgggcacctgcgtggtcaggcgtccaggcacgtgagacccacgggtgcttggtaaaggccaggagaccaggcagggaccagggagctgggctgagtcacattggttggtggcctccaccctggcgcctgccggaaggagggtgctggggaggcctgggccgccgctgacctcggaggcagccccatgagcctcctgggcctccagggagtcgggtgcctgctgtctcagctgccacgcctccacctgcagtaggtattttgagcaaagcttcccggcacttctccgcaaaatccgctgagtctgtggttttctcaggtcagcaaaagaacagagactggagaggaaatcgagcctgtggtctgggatgtgagaggtgctgggggtacaggggctgcagtgctagaccacccaggcctcaagaacccagggcagggggtaggatgggagggccaggtggccccattgaaccctgccctgcccctttgcaaaacggcatcctgtgctcatcacacaagccgtgcctcagtttccccatctgtaaactggggcattagtaggactatg[282 bp omitted]gcctcccaaagtgctgagattacaggtgtgagccaccacgcccgattaatttttgtatttttagtagagacagggcttcgccatgttggccaggctggtctcgaacttctgacctcaagtgatcctcttgccttgacctcccaaagtgctaggactacaggtgtgagccacagggctcggccaattctttttttttttttttttttttaacctttgaggtgaaattcacataacataaaatttaccctttttaaaatgcacaattcagcagcatttactgccctcacagtgttgaacaagcaccccctctatctaattctaaaacagttcatcctcaaaaggagacttgtacccaacagcagtccctccccatcccctaatctgtgtaagaggccttcagggagagctgaggggtgtctttgggggcattcatccttagccccccaaaactcccctggggcaaggctgtggtgagcagccagcctggggcagggcgggggatggggacagctggttaggagggctcacataggctgggggacagagtccctgctcagaggggcacaggctgggactaggaggcctttcccagctccatagtggagtctcagccaggaaaagccgcgggcggccaggggagagggagggcgagccggtctctgtgcaaggagcatcagctgacaggcgggctgcgaggctctgggccaggaactctgatttctttccccctaggaagctcagacacccgcctcagcacgagggccttgcctggcactgctccctgggactgctggggctggcagcctgaaagagggacagacctattgtggggggaccaggagctctggattcactcccacctagactccaggctcagccacatgcagtccgcggtgatcctgggctggcaccggacgttcggagcctcagtttcctcatctgtaacacagggctaagaacagcacctgcctcagggacaagttactgcccagaacgggcctggctcacttccttccacctccaaagctttccttgacccctgacttggtgaagtcttggacgttcttgcagtccgttaagcagtggtccttttacgaggacagggctgggtctgccttgggctcgcacagcctgacacaggcccatatgcagtaagtgcttaacaaatgcctgaactgatgccaggatggactggtgctatcaggaaggaaccggaagccaggcctggtggctcacgcctgtcatcccagcattttgggaggccgaggcaggcgggtcatttgaggtcaggagtttgagaccagcctgaccaacatggtgaaacccgtctctactaaaaatacaaataaataaatacatcagctgggtgtggtggtgcatacctgtagtcccagctacttgggaggctgaggcaggagaattgcttgaactcgggagatggaggttgcagtgagccaagatcacaccacggcactccagcccgggtgacagagcaagactctctttcaaaaaaacaaacaaacaaaaaaaaaagcaaggaactggctttctgcccctggaggattccagggtgacagtcgtgtgacagctcagacactcgggccccgagcagcccaccttgcagccacctcacctgattctcatcagcaggggacttgggctccccagctgcaacccggtggccccaggctggccaggaatcttccgccctggccctgggaccagaaaccccgcaaaggtgcccgagctcagccccgtccaatgcacgggggccccattcgtgacaccaggtggacacgtgacggctcagaaggtgtttcctgtccctagtggtgtggccgggccagattccgaaatctggtccctggaaaattccagccccacggagcctggtaacccctccccattcctggtgttatgtaacatttggggattaataccgcaggcgtccaggggcggctgccgggattcaaacccagcgctgccctttcctgggctgactgagcgactttgcgtccctgggtctcaatgtcttgcctgtacaatggggacaaggcccgtttttgtgtcccaggctgggtggaagggtgagggaagacctcaccaggaaaggggtgcacctgagtctggggcagggcttggagcaaccacccccacgattccgggggagtctcaagccccccactgtcttcccacccagctgttctctgagttctctgaggtttctgatgctctctgaggtcgccatttcaaggacgtccccacctggctgtccgtgcaaaccccagccagggtccacctgctgctccacacagcccatcccttctccgggctgaagctccctcatatgggacatccactacactgtaggaccccagcccatgcgtccccaagccccggtcctgcctcctgggtccctgtcccaggcctcaccgccctccccaccagccccagcatcacaaacgctgggcttctctgccgctccgaattctgctgtggctccccagtgcccagggccatcaagccccaggttttcatgtgggccccagggacccgccagcagggaggacccgaaatggcacacattcagaacgtcgaggctcatacctcaagcgcactgtgggggagaagcccccggaagcccccaaccccccacgcgcgagagagcctcagtttcccgctcggtaaagcgggcgtatcagcggttcccagccagcccgggtgtgcagggtcggaggagctcgcgggctgagcgcggcccctggcgcccggttggcgtgcgggactcgggcgcgctctggtccgtggaacttccccagccgcggcgtccccgccgctcacgcgccccccactccacggccgggcacctcccgcccctccccgggctggacctgcgcccgggctccgccccctccccgcccccgcggccaataaaacgctccccggcggctcctgcgccctcagagcggccccggagcggccgcagcgcggtggtctcggcccggctgcgccagagtccgcgcgatggagccccggccgcggcggcggcgcaggagtcgccccctggtcgccgccttcctgcgagacccgggctcgggccgcgtgtacaggcgcgggaagctgatcggcaaggtgggaggcccgcgccccgagtccgcgacggggccggaccgggctgggctggggtcccggggcgcgcgggcgatcctgcgcggtctacgcggcgcgtccctgcgagcgcggggtctggagcgggcgcgcgtccggagccgcggggcctcccgtgcggggtttcgcatggcgggaaccgtgttgagcgcgctgtgcgtcgtgtccgtgggttgcgtgtccggggtgtgggcgtgcggctcggcctcgggatgcgacgctgtgttgcccctgggtgtgtgtgcgagcctggcgagggtctgagtgtgccgcgtctgtgcccgctgcttccaagtgtctgggtgctgtgcggtgttcgtgtgtgtgtgtgtgtgtgtgtgtgtgtgtgtctgggtgttgtgttgcttgttcacctgttgtttgtgcgtcatgcctttgtgtgtccagtcattgtgttgtgtgtctgggtgttgtgtgttcatgtggtgtgcttgtgtgtttgtgtgttcatatgtggtgtgtctaggagttgtgtgttcatgtgtttgtatctgtgtctttgtccatgtgttgtactgtgtgtccaggtgttgtgtgttcatgtgtttgtgtgttcctgtgctgtgtctgggtattgtgttgtgtgtccacacgtggtgactgtgtgtccagacattgtatattcatgtgtttgtgtgttgctgcgttgtgtatctgggtgttgtgttgtgtgtccatgcatggtgactctgtgtctgggcgttgcgtgtttgtgtgtcgtattcaggcgtggtgttgtgcatccggtgctgtcttctggtccgtggcctctatgcaccaggcgtggatgtgtctgtgtctgtgtctctgtgccttcttgtgtgcatcatgtcttgtgtgtccaggcgggagggtgggagctgtgtgttgttttttccccggtgtgtgtgtggagagacctggacgcgcctgcgtccctggctgccctgtgcctctgtacgcgctgccagcttgcacacccgtgcacacctgcccactgatctgctgacccctccccacagggcgccttcagccgctgctacaagctgacagacatgtccaccagcgccgtgttcgccctcaaggtggtgccgtgtggcggggctggggccgggtggcttcgcccgcagggaaaggtgcgtgtccccatcggtccccagggcccacagtccgcagcccgcagcgtgtcccgaagaaggccctgccctttggtcccagccctgggtggccatgagatcgtacaggaggcaggcgagcatcctgcagcctgtgccccgctgcaggcgggtacatgtcggggccgtgcctgcaggtggagcgtgagattgccctgcatagccgcctgcgaccccgcaacatcgtggctttccacggacactttgctgaccgcgaccacgtgtacatggtgctggagtactgcagccgccaggtgcccaggggcggggagagggcaggattcatgtcagctgtgcccgtctctgtccaccccgtgtccatctgcacctcgccgctgccccccgtaccatcctgtgtgccctctgctgtccattcgccagcgcttcttacgcctacgtagggccaattgtgtccatcctttactcacctgggcacacccaggctctcttgatccacctgggcccagcttacgctgtgctcatcaggcccgtctcagactcacctgtgaccgcctgggcccatcagaatgtgtttgcttcttcttggcccccttggactcacccatgcccacctgtacccaccagcatgcccctgtgcctacctgtggtcacctgcgcccctcctgcaccctgctgtgcccaccgtggccgtgaactcactgtgcccattaagtagacctgagcccacctgggtccacctgtgccagaatatgccccctctgcgttcactcctaatcacctggcccttctcaagctgacaagcatgtccaccagcgccgtgttcaccctcaaggtggtgccaggtgcggggccggggccgggcagctgtgcccgtggggaaaggttcgtgccccccctcagtggccacctgggcccatctgaacccgcatgctcctattggggtgggtcatctttgctcacctgtgtgcacctgcgctcacctgtgctcatcccataatcagccataccaccttggccaggctgagcttacatttgccttctaatccggggccgctggtcacccacagtctttggcccacgtgctgagggcgcggcagatcctgacggagccagaagtgcgcgactacctgcggggcctggtcagcggcctgcgctacctgcaccagcggtgcatcctgcaccgcgacctgaagctcagtgagtgccaggaaggggaactgtgggcgggggcgtcgggaggtgggcacggatccacccccatgcgcaatgcccctcccactgccaggtaacttcttccttaacaagaacatggaggtgaagattggagacctgggactggcggccaaggtggggccagggggccgctgccacaggtgagagccggggggagggctctgagcagtccgtccgggtgggcacggctggccctgaagtctggcacggggatcccagccttcctgagccccccatgacgcccttcctagagtactctgtgggacccctaacttcctggaccctgaggttgtctccagaaacggtcactcctgccagtaggacatctgggctctgggctgcatcatgtgagtggggtcctggagaaggtgggcagggcctccggggggggcaggtgtggcggggggggagcctgcacggaacaggtggggaccgttgtgcagggtggggcgcgtggaacaggcacctgtcgccaagtgtgcagtatgaacaggacgtgtgtggggaggcgtgtgtgagggaggacgggggagggtgtgcacagagaggtggacaggtgtgggcaggtggcagtggcacaggcaggtcagggcgtatgtgtacagggatacagcgtgtgtgggcgcagggcaggtgtgagcaggcatgggatagcattggaaggtggaggccaggcgcagtgactcacgcctgtaatcctagagctttgggaggccgaggcaggaggatcgcttgagcccaggagttcaagaccagcctggccaagttggtgaaaccctgtctctacaaaaattacaaaaattagccaggagtggtggtgtgcacctgtagtcccagctattcaggaggctgagttgggaggattgcttgagctcaggaggtggagactgcagtgagctgtgattgcacaacggcactccagcctgggtgacagaatgagaccctgtctttaaaaaaaaaaaatagaagcattgaaaaggtgtatgcaggtgagttcagggtgagccaggtgcaggcaggggatggacagacgctggtgtccaccaagcagggtccatgggactgcacagggtgccaggtgcaggcaggggatggacagacgctggtgtccaccaagcagcgtgcatgggactgcacagggtgctaggtgcaggcggatgttgggagatgaggaagccgatatgggttgcacagctaagctgtgtaggcaggtctggccaagtgtgcaggggtagctctgagcgatgcctggacacccaggttcttgccccccacctggcccaggtacacggtgctgactggcaccccacccttcatggcctcacccctgtcggagatgtaccaaaacatccgtgagggccactaccccgaacccgctcacctgtctgccaatgcgcgccgcctcatcgtgcacctcctagcacccaacccggccgagcggcccagcctggaccacctgctgcaggacgacttcttcacacaggtgggcggcggtcctcggcgtggggtccctggcgtggggtccctggcaggtgatgagccagagcctgccctgctcagccgagggaggccccgccctgtcccaggtaacccaggtgctcaggggctgggtgacctaagccggggataaccccaaatccccatccaaagggtttcactccagaccggctgccggcccactcctgccacagtccccccatcttcgccatacccccgcctctgggcaggatcttccggaaggtgggccagcggctgctcacccagtgccggccaccctgtaagtaccacccccgcccacacctgcccaacacctgcccacgcctcccacctgcccacacctcccacctgcccacgcctcccacctgcccacacctcccacctgcccacgcctcccacctgcccacgcctcccacctgcccacgcctcccacctgcccacgcctcccacctgcccacgccccccacctgcccacgccccccacctgcccacacctcccacctgcccacacctcccacctgcccacacctcccacctgctcacacctcccacctgcccacacctgcctacgcctgctacctgcccccacctgcccacacctcccgcctgcccacacctcccacctgcccacaactgccacctgctccgctctgtctccacatcaggggtgggtgtgggtggcaggtgcccccctacccccagcttggggcccaggctgtgccccctccaaggccttgtgcctccctcaggccccttcacgcctaaagaggcctcgggtccaggagaaggtgggccagaccctgactccatggagtgggacggcgaggtgagacatcggggtgggggacacggggagacacaggtggagggcatgctggcccctgctaaaaccccctcccccatgccggcttctctgaaccccttctggggtctccaagcccggccccctccccctagtcccgtcctgacgcatcagagctgggatccatttgtgtccaaatgtgcccacctgggctttcccaagggccgggctcgaggccatgggaagggtcccatccatggcttcagtccatcacatttattgagcacctactgtatgcctccgagacactccgaggctgcctcccaaggggaaagcagtgcctctgtgtgcagagcacggagggcacaggcaggggccagagcctgccacccacctcacgcctgtccctggggctggggccggggccacccccacccctgctgctcccacctcagagctccctgtctgcgaaagaggttccctgcctggaaggccccatccacctggtcgcacaagggaccctgcagagtgacctggccggtgagcagatccccgtcccagcccggggctgcaggtggggagggaggaattacaagtgacagggggaccaaggccgtggcttaccagggtcacagccgccgtcccggcctcacctttcccgcctgtcaaatgggaatgccgcctctgggttgaggatgagatgttcctggatggagccgtggggagggggactggttggaagagcctggtggtgggaacccagacctgtctgcggcacaaagacctgtcttcccagggcccgaggggagccggcggccagaggtggaggcggccctcagacacctgcagctgtgcctggatgtaggccccccgggtaggagccggcccagcccccaggatcacctttactcttactagccaagtaaaattgccttcattcccatcctgggccctcctgggtatttctgggggtgaggagtaggggtgagggaggccccaggacacggtgacatcaggagagtgggttagccctcctgtgtgcagagcctggcacggagggctctgcggcagccttacgtttcacggtctcttaaattcatgacccgggctcgttagagacccagtgagtgaggaaacgtgacctgggacgttggacacagagccctgtgcccacaggccacactccaaagggggacccctcttatccccagtgtcccagaacccaaaccctcttcctctcccctcctctccctgagcctccactgacccacacatactgccacccttagagagggagccccaaaccccacgccaggtctccagcccagaagccttttcttttccttttctttctttttttttaagagacggaatctcactctgttgcctaggctggagtgcaatggtgccatcttggctcatcacaacctccacctcctgggttcaaagcgattctcctgccttagcctcccgagtagctgagattacaggcgtgtgccaccacacctgctaatttctgtattcttttagtagagacagggtttcaccatgttggccaggctggtctcgaactcctgacctccggtgatctggccgcctcagcctcccaaagtgctgggattacagacgtcgtcagccaccacgcctgggcgcatttttttttttttttttttttttttttttttttg[272 bp omitted]cccagcctcaggaccccatctctacaaaaaaatgagccgggcatggtggtgcatgcatgttgtcccagatactcaggaggctgaggaaggaggatcacttgagctcggaggtggaggctgcagtgagctgagatcgtgccactgcacttcagcctgggcaacagagcgagaccctgtctgaaaagccaacagacaaacaagcaaaaacccagaaacggggcagggcgtggtggctcatgcctgtcatcccagcactttgggaggctgaagcaggtggatcacaaggtcaggagatcgaaaccatcctggccaacatggtgaaaccccatctctactaataacacaaaaattagctgggtgtggtggcacgtgcctgtgatcccagctactcaggaggctgagggaggagaatcgcttgaacccaggaggcggaggttgcagtgagccgagattgcgccactgcactccagcctggggacagagcaagactctgtctcaaaaaaacaaaacaaaacaaaacaaacaaaaacacacacacccagaaatgtgtagtattttcagagcattgcaagtatttgagaattgctcattcccaggggtgcgccagtatcccacagtctccctctgcaagccagaaattagttacggttccgtggcttctgttgatgtctggtctcctagaatccaccaccgaagcccccaagcctctgtccggtccccgccgtgggaagggtctcacccatggtttcagtccatcacatttattgagtgcctactatatgcctgacccctgacccctggctcagcatacctttgtttgtgcccagccacacaggaccccctgggagagcagcagcccatcctctgggcccccaaatgggtggattattccagcaaatacggctttggctaccagctcttggacggggggcgcacgggacggcacccacatggccctgcgaccccccggagggtaagttgtggcctcctgtgccctgggggaccaggcactccccctgccttttttcattcatctctcaagtatttattaagcacctactgtgcacacctacaggtgctccctgcctggtcggggagaacaacactaaacgaatcagcaagtgcgtttctgtagtaaatgaacccagtgaagaggcagattaggaggggaggtgaatctcagtagtgtgggtagggggaaggggaaggggtctctgagaaagtgacgtgaatgacaagcggcagccctgtgctttgggaggccaaggcaggattccttgagcccaggagatcgagatcagcctggacaacatagcaagaccccatccctacaaaaattttaataattagcttggtgtggtggcacacacctataatcctggcacgttggaggctgaggtgcggactcgcttgaacccagcagtttgagatcagccttggcctcatagcaagaccccatctccacaaaaaaattaaaaattagctgggcgtggtggtgcacaccggtaatcctggcactgtgggaggctgaggtgggagaatcacttgagcccagcagtttgagatcagcctgggccacacagcaagacctttctctacaaaattttcttctttttttttttttttttttgagatggagtctcactctgtcacccaggctggagtgcagtggcgcaatctcggctcactgcaagctccacctcccgggttcacaccattctcctgcctcagcctcctaagtagctgggattacaggtgcccgccaccactcctggctaattttgtatttttattagagacggggtttctccatgttggccaggcgggtctcgaactcctgacctcaggtgatccacccgcctcagcctcccaa[224 bp omitted]tcagtaggtcccagctacttggatggctgaggtgggaggatcacttggtcccaggaggtcaaggctccagtgagccatgattgcaccactgcgctccagcctgggtgacagaacgagactctgtctcttttttttgagacggagttgtgctcttgttgcccaggctggagtgcaatctcggctcagcgcaacctccccatcccgggatcggggtagctgggattacaggcacccgccaccacgcctggctaattttgaattttagtagagacggggtttctccatgttggccaggctggtctcgaactcccgacctcaggtgatcctcccacctggacctcccaaagtgctgggattataggtgtgagccaccgcgcccggccttaacacaatctttctagcgggagtgacatgggggccagtggggaggtggctggactcatcaggtgggcagtggcggaggcctgggctgtgctggtgaccggggagggatgagaggggctgcagtgtggatagagttggaaggcaggaagggtggaccagctgtcagctgaggtgaagagaggacagagagccgcactgggcatatggataaggtgtaactagggcagagctgctctttaaagccaccattccagggggtgtaggtcaatggaagggtgtccactggcctgggctgtccaggacagaggccctgtgtcctggccccagccaagtgtgctacatgcccaactgcgggaggctggaagccttcgccctgagggatgtgcccggcctgctgggcgccaagctggccgtgctgcagctctttgccggctgcctgcggcggcggctgcgggaggtgagagctggggtgctgggtgtgggggcgaggggtggggacgccccctgcgtcacgtgacctcagccgagtctgtccacaggaggggaccctccccacacctgtgccacctgctggacccggcctctgcctcctgcgcttcctggcctctgagcacgccctgctgctgctgttcagcaatgggatggtgcaggtgagcccggggctcaaactcggggcactggggctcggcagggtggggtctggcctgcctgggctgttacggagcaagctttgggggagccttaggaagcatttgcctcccaggaaaaaaaaaaaaaaaaaaggtattggctcctgcgtacaaaaccacagcatggaaaatgcatgacgtttttgggccaggcactgtggtccacacctctaatcccagtgctttgggaggccgaggcgggcagatcgcaaggtgaagagtttgagaccaacctgaccaacacggtgaaaccccatctctactaaaaatacaaaaattagctgggcgtggtggagccttcctgtaatcccagctactcaggaggctgaggcaggagaatcgcttgaacctggcaggcggaggttgcagtgagccgagatcacgccacagcactccagcctg[225 bp omitted]tggggaggctgaggcaggagaatggcgtgaacccgggaggcggagcttgcagtgagccgagatcgcgccactgcactccagcctgggtgacagagcaggactctgtttaaaaaaaaaaaaaagtcagggtcttgctggaagactgtgggcaggggagcccccatctgagcctcagtttccccaggtgtacagtggagcacttggcctcccgaccccgagttcctgtggctggggcaggcactaggggccagactgggggctctgggtccagtgtccacttgtccttctggagcgccacggctggaggcaggtgcaggggtacccgtctccccttgactggtatcttaccctttgcaggtgagcttcagtggagtcccggcccaactggtgctgagtggcgagggtgagggtttgcagctcaccctctgggagcaggggtcccctggcacctcctactccctggacgtcccgcggagccacggctgcgcccccaccaccggacagcaccttcaccacgccctccgcatgctgcagagtatctagtgcccctgagggtcagagtggacccctgcatggtagtgccagggacccaggctccatttccattcctgtggctcccccagaggggctgtcctgggggagggctggggggcacacgggaggtgggttcttgccttgtggcatgactgttcaacccagactttgctgggatctcttcctttttcattaaagacaatttgaaatgctgtaggccatggtctgcctctctttgggggaaagcgtttgaggagctttggcaaagaaacgttgaccccacgtgacgttgcatcctccctgtttctcttagtggcagaggtgggttacattttcactaatgcagacattagcaccagaggccagtgtagtggctcatgcctggaatcccagcactttgggaggccaaggcaggaggatcgcttgggcccaggagtttgagaccagcctgggcaacatggcaagaccccatctctacaaaaaattagctgggcatggtggcacgtgcctgtagtcccagctacttgggaggctgagatgggaggatggcgtgagcatgggaggttgaggctgcagtgagctgtgattgcaccactgcactccagcctgggcgacagaacaaagaccctgtctcaacaacaacaaaagtagtaccagaagtggggttctgccataactccaaatctaaaacatgggacagttgcttaatgggtggacaggaaagaagccgacactgaggctggaaagatggctggctatgctccgggacacagttggcacaaccgtcacctgtgctgccctggggtggacggtgcactcatggacctgacctctctgggctgatggagcattggttgttagatcaaaatgtcataaaaggccaggcgtggtggctcacacctgtaatcccagcacttcgggaggccaaggcaggcagatcacttgagctcaggagttcgagaccagcctggccaatatggtgaaactccgtctctactaaaaatacaaaaattagctgggtgtggtggtagggggcctgtagtcccagttactcaggaggctgaggcaggagaatcacttgaacccaggaggcagaggttgcagtgagccgagattgcaccattgcactccagcctgggcaacagagcgaaaatccctctcaaaaaaaaaaaaaaaaaaaaaaactggacgcaacctaagtgtccagcggtgcgagactcaaacatctggccatcccctgggatgagtgaggctgggaaagtgggaaggctcacgggaggcattaaggcaggccgaggggtgcagagctgatgacggaaaaacccgtcaatcgcagaaggactccaggcccctcagtagctcttttgttttttttgagacagagtcttgctctgtcgcccaggctggagtgcagtggtgcgatctcagctcactgcaacctccgcctcacgggttcaatagattcctctgcctcagcctcctgagtagctgggattacaggcatgtgccaccacgtccggctaatttttgtatttttaatagagacagggtttcatttgtttgtttgtttgagacggagtctcactctgtcgcccaggctggagtgcagtggcacgatctcgactcactgcaacctccgcctcccgggttcacgccattctcccgcctcagcctcccgagtagctgggactacaggcgcccgccaccaag[186 bp omitted]ctcctgacctcaggtgatcctcccacctcagcttcccaaagggctgggattacaggcatgagccactgtgcctggccccctcattagcacttgaggccacaattctcagtgcgaggctcctgggctgtgctttgggcgtctgctaaggtgctcagaggtgtatcctatgctggagaaaactccacctcgaccgatgcgggatcaggagaccggggctccagtcccagctggccacttccaggcacatccaggcctcagtttccctgcctgtttaaggggggcatgtattctctggaatccctgccagcagcatgattctgcatgaagttctacttccaagttccggttatcaaccccagaaactcatcataaaagagggagaagtggctcatgcctgtaattccagcaggctgggaaattgaggcaggcggatcacttgaggacaggagtctgagacctgcttgggcaacataggaagactctgtctctactaaaaatttaaaagccaggcctggtggcacatgcccgtggtcccagctactcaggaggcccaggtgggaggattgcttgagcccaggagttcggaggtacagtgagctatgattgcaccacggtactccaccactactctgggtgatagagcaagaccctttctcaaaaaataaaaataaaaaattggctgggtgccgtggctcacgcctgtaatgccaccaatagacagatcacctgaggtcaggagttcgagaccagcctggccaacatggtgaaaccctgtctctactaaaaatacaaaaattagctgggcgtggtggtgagtggctgtaatcccagctacttgggaggctgaggcaagagaatcgcttgaacccaggagagagagtttgcagaaggcgccactgcactccagcctgggcgacaagagtgagacttcgtctaaaaaagaagaaaaaagagagacattcctggaggtgcgcacaaaagggcatcattgacatctggagtgcagtggcatgatctcggctcactgcaagctccgcctcctgggttcacgccattcttctgcctcagcctcccgaatagctgggactacaggcgcacgccaccgtgcccggctaattttttgtattcttaatagagacggggtttc[138 bp omitted]tgtggctcatgcctgtaatgccagcactttgggaggccagcgtgggcggatcacgaggtcaggcgttcaagaccatcctggccaacatggtgaaaccccggctctactaaaaatacaaaaattagccaggcgtggtggtgtatgcctgtaatcccagctactcgggaggctgaggcaggagaatcacttgaaccggggagtcagaggttgcagtgagccaagattacaccactgcactctagcctggcgacagagagacactccgtctcaaacaaaaaaaaaaaaaaaaagaaagaatagtagttgttctcaatggtgggggggggggtgattctgtccccaggggacactgggctatgtctcgggacatctgtggtcataatgacagggagtgctcctggcatggagtgggtgaagggcagggacgccgctcagcaccctgcaatgcccaggacagccccaccccagagaatggcttggccccaacatccatagtgcccaagaggagagaccctagcttggacataggaactgaaatatttacaggcttagtgtttaattcctaaagcggatttcctctgtaatcagggaaaaaaaaaaaaaaaaaaaaaggaatgaagtggagaaacggcactcccgggagacgttgcacattcccaagcccacgctgcacctcacacgcagcggggagcaatgtccccgtagtggcccctcgtcaaggtcagtgatgcacggggcgagagaggggttgaggtggggatggcctcctgccaagcacaacgtgtcctggggccacccatctgcaggcagagcgctccaccactcaaatgggggcgtgatgagtccgaggccacccaggtctgaagcttcccaggggccctcctcacagccctttccctttggaaccatagtctatcaattctgaaagtaaaatgcagacttttcttttttttcttttcttttttttttttttgagacagggtctcactctgtagcccaggctggagtgcagcgatgccatcttgactcactgccccctgtgcctcccgggttcaagcgattctcctgactcagcctcccaagtagctgggattacaggcatgcgccaccacacccggctaacttttgtatttttagtagagatgaggtttcac[215 bp omitted]gctctgcctccggggttcaagcaactctcctgcctcagcctcctgaatagctgggactacaggcatgtgccaccatgcccagataatttttgcattttcagtagagacgggatttcaccatgttggccaggctggccttgaactcctgacctcgggcaatctgcccacctcaggctcccaaagtgctgggataacaggcatgagccaccgcgcctggcccatttcttttatttttatttatttatttttttttttgagatggagtctcactctctcgcccaggccggagtgcagtggccggatctcagctcactgcagcctccgcctcctgggttcaagcaattctcctgcctcggcctcctgagtagctgggactacaggcgtgtgccaccacacttggctaatttttgtatttttagtagagacggggttttaccatgttgcccaggctggtcttgaactcctgacctgaggcaatccacccgcctaggcctcccaaaatgctgggattacaggcgggagccactgcgcttggtctggatgccgtttctttgtcacaaaattgcaaccttaacaaatcaaactcaagtcccagggtccaccaccacctgtccctgggccccctctgtttctgggaagtgacagggtctcctctttttttcccatctgtttcctatgcttactttcctggagagaataactgacccatggcggcatccccgcgtcgcctctcggccgtgtgcctgtgtgtgttgctgcgtctgtggagatagagccaactctgtgctttttatggaacgggggatgaagcaaagccagcgtttgtggatgggagagaaaatacgaccaaaacagacactggggcccatgttgggagtagagagggctgcaggcacgctgggctggggtggggggaggaagcagggggacgggtcaggggaggtcgtgtgccttggtgtggccagacctaggaggagggatcagtggggagaatttggagatgcccccagggaccccaaaggaatggagtgtgggtgagagaggaacaaaagcaagcagagaaaacacagagcaagtgcatcactgcctttaaaaacaaaatgagccggccgggcgtggtggctcacgcctgcattcccagcactttgggaggctg[134 bp omitted]gaggcaggagaatggcgtgaacccgggaggtggagcttgcagtgattgagtgattggagatcacgccattgcactccagcctgggcgacagagcgagtctccatctcaaaaaaaaaaaaaaaaaaagtttgttgttattgcaagacaccaagttgttgttgttgttcttcttcttcttctccttcttctctttcttcttcttcttttttttttttttgagacagtttctctctgtcgcccaggctggagtacagtggtgcaatctcagctgactgcaacctctgcctcccgggtgcaagcgattctcc[134 bp omitted]ctgcccctcaaagcgctgggattacaggtgtgagccaccgcgctcggcctcttctctttttttatagagagaaggagtgtcgctccgtcacctaggctggactcaaactcctggtctcaagcaactcccccgtctcagcctcccaaagcactgggattactgtgagccaccgtacctggcccagacaccaaatgtgaaggtaacttgtgacccggcaatagctaactaatacacaacccaaaacatgcaagaaacagcttcatttctgcccggaacatttgtttccagggagaaaaagacaaaacatcttcagagtgtttaactgggtgtcttgcaaaatgacctacctagagtatttatttccatctgcttgtgggcgtcaagaacagcaacaatctgtgccgtctcccacgccccgagcccacaatggtggtttattaaaaataaaccaaccacagaatatattaattttctaacctcccgggccaattcttatttctaggtataagaacttccagagatggcaaagcacccacaccgccctcgtgctaaagtttctggaatcttccttagacgggtgaactgtgtgctgccagaaataaaattaatagcctcacttttttgggtgcttacaagggttggaacttcaagaaatggtcatgaattcactccagccctggctcaaagatttttttttctttcttcccttcttcttccttcttctccctactcccttctcttcctctttctcctcctccttccttctccttctttttctttttggaaaccactgatttaaccctgagagagggaaaacttgtcctggcaagaatttccaaagctcagttttattttttaagacaaagtctcgctcttgtcactcaggctggagtgcagtggcgtgctctcggctcactgcagcttccgactccctggttcaggagatttttctcgtgcctcaggatcccaagtagctggtactacaggcgtcatcatgcccggataaattttctacttttagtagaga[132 bp omitted]ttttcccacgctgaggctacagctgaacccagcctccagaccacctcctcattggtctatgggagcacgtgacatcatgcgtcctccaatcaccagcaagcaagcaaggcgtgggcgggaccaagggcggctacctctggggccagcaggattggctgttgcccgtggtaactgtgtgtgacgtcataaagcttccttgcaccttggcaaggccccgggagcagggaccttttctctcccactatacagatggggacactgaggcgctggttctcaatctatgaaaaaatggggtgctggtaggtaggtcaacctgggtcccacggggagttttcaaactcctgatgactccagagaattacgctgagtgaaaaaagcctgtcccggccgggcgcggtggcccacgcctgtaatccccgcacttaaggaggtcgaggcagccgggtcacaaggtcaagagatcgagaccagcctggccaacatggtgaaaccccatctctactaaaaatacaaaaattagccgggcgtggtggcgggcgcctgtagtcccagctactcggggagctgagggaggagaatcactttcaccacggaggcggaggttgcagtgagcctagatcacgccactgcactccagcctgggtgacagagtgagactccgtctcgggaaaaaaaaaaaaaaaaaaaaattagccgggcatagtggggtgtgcctgtggtcccagctactcagttggctgaggtgggaggatcacctgagcccaggagttccagaccaccctggggaacatagtgagacccca[170 bp omitted]gtggcgggtgcctgtcgtcccagctactcgggaggctgaggcaggagaatggcgtgaacccggggagacggagcttgcagtgagccgagatggcgccaccgcaccccagcctgggcgacagagcaagactacgtctcaaaataaataaataaataaataaataaataagccaaggatgatgatgcacacctgtagtcctagctgcttgggcgactgaggcaggaggatgccttgaacccaggagttcatgtaggttgcagtgagctgtagttgcaccactggagtccagcctgggcaacagagcaagaccctgtgtaaagaacaaaaaaagtttatgtaacattttagaaatggaattagggttagggatgagggtgcggggagggtgcacaaacagcaagagatcctgatggtgatggaaatgctccatgtcatgatggtggatacacgaatctacccaggccagcaaattataggagactaaagacatctcacacactcacacacacgatcacaagttaaactgaggaatcctgagtaagattgatggattgtatccatgtgaaatcttacttatatgttttttagagatggagtgtccttaatgcaccccaggctggagtgcaattttgtgatctcagctcactgcagcctctggggttcaagcgattctcctgcctcagcctccggagtagctgggattacaggcgcccaccaccacgcccgactaatttttgtatttttagtagagatggggttccactatgttggccaggctgctgtcgaactcctgacctcgtgattcacctgccttggactctcaaagtgctgtgattacaggcgtgagccaccacacccgtttttgttttgttttgttttgttttgtttttgttttgagatggagtctcactctgttgcccaggcgagagtgcagtggtgtgttctaggctcagtgcaaccaccgcctcccaggttcaaacgagtctcctgcctcagcctcccgagtagctgggactacaggtgcccgccaccacgcccggctaattttttgttgttgttgtatttttggtaaagaggaggttccccatgttggccagcctggtctcgcactcctgacctcaggtgatccacctgccttggcctcccaaaatgctgggattacaggcatgagccacagcactcggcccttccctcctttctttctgagacagggtcttgttccgtcacccagactggagtgcagtagcaggatcacagctcaatgcaacctagaagaattcctgtcgtcctgtgctcatgagatcctccctcctcttgcaactgcatatgaattgacaattatttcaataaaattttcaattaaaaaattatgagggctgggtgcggtggctcactcctgtaaccccagcactttgggaggccgaggcgggcgaatcacgaggtcaggagttcgagaccatcctggctaacacggtgaaaccctgtctctactaaaaatacaaaaactagccgggcgtggtggcgggcgcctgtagtcccagctactcgggaggctgaggcaggagaatggcgtgaacctgggaggcggagcttgcagtgagccgatatcacgccactgcactccagcctgggtgacaga[225 bp omitted]gaggcaggagaatcgcttgaacccgtgaggcagaggttgcactgagctgagatcgcaccactgcactctagcctaggtgacagagcaagcctctgtctcaaaaaataaaaagagaaaaaaagaaaaaagccaagaaagtggagtcttttctgcccttgaaagggtagtggtaaaactctctgggtggtgtggggtgtccaggtatctctctgtcgcccctaacactgggcgagactggatctgttttgcataaaggaagaacacatttctgtgtcccctgccagtcatccatgcaatcatcaatttcgttgttgttgttgttgtttgagatggaccttccctcttgtcgcccaggctggagtgtagtagcatgatctcggcccactgcaaccttcacctcccgggttcaagcgagtctcctacctc[212 bp omitted]gcgtactagcgctgaactactgggcgagggtcggccagcggcaggaaaacggggaaacaggtgcgcccgtttgtgcgcgggggaagctcgcagccacgagcgaagggacctgtgtctccactttggacaaatctcccgggaatttcccgggggttcagagctccgatgtcggggcggggaggggcagggtgtcatgtgcggcgctggccacacggtggcgacagagaacgtgccgttctggtccagcctggcggctgtggggtcgaaatggggaaggagttggggtcgcgatggagtcggggaggcagtggggtaggagcgagggcccccttttttttggagacagagtttctcgttgctcaggctggagtgcaatggcgtgatctcagctcacctcaacctcctgggttcaagcgactctcctgcctcagcctccagagtagctaggattacagacatgcaccaccacatccggctaatttttgtatttttagtagagacggcttcgccatgttaggcaggtctcgaacttaggacttcatgtgatccatctacctcggcctcccaaagcgctgggatgacaggcgtgagccaccacgcccagccgagacagcctacccactgtgggctttggcaataaggcgctcaatcaattataataaacacctatggaattaattcccgtctgtgttccccaaaccgtcctccccaacccccaccgccgcccagtaattcagggaccacaagaatggaggtctctggcttataactctcactgagaagcctgatgcaggagctcacacctgtaatcccggcacttcagtaggccaaggcaggaggatactactgagcctcggtaatgtattgttttttattttttttattttatcatatatatatttattatactctaagttctagggtacatgtgcattctcagcaaactattttttcttttatttttatttatttatctttttatttttgagacggagtctctctctgccgcccaggctggagtgcagtggcgcgatctcggctcactgcaagctccgcctcccgggttcacgccattctcctgcctcagcctcccgagtagctgggactacaggcgcccgccaccacgcccagctaattttttgttttagtagagatggggtttcaccgtctcgaactcctggcctcattgatcctcccacctcggcctctgaaagtgctgggattctaggcgggagccaccgcgccccgccaaggctgggtaatttataaacaaaggaggttcctggactcacagttctgcatggctggggaggcctcagcaaacttacaatcacggtgcagggggaaacaagcgtgtcttacctgactcaggcgaaaagagaggaaggaagagcagggaaaactgccttataaaaccatcagatctcgtgagatctcactcactatcagagagcagcacgagggaaccgcccccatgatccaatcacctcccacctgctccctctctccacacgtggggaccatggagattacaaccgagatgagatttgggtggggacccagagccaaacctcctcaggacctctgtcccccctcctctcctcccactgcctctgggcacgctggcacccctgcctcctcttccctggttggtctttggtgagatgtgtgtccattggtcccagaacctggcgttgcccaggctggagtgcagtggggcgatctcggctcactgcaagctccgcctccccggttcatgccagtctcctgactcagcctcccgagtagctgggactacaggcgcccgccaccacgcccggctaattttttgaattttttagtagagacggggtttcgcc[138 bp omitted]ctcacacctataatcacagcattttgggaggccaaggcaagtggatcgtttgagctcaggagttggagaccagtctgggaaacatggtgagacctcgtctctattaaaaacacaaaaaattagccaggcacagtggcacatgcctgtaattccagctactcaggaggctgaagcaggagaatcgctggaacccaagaggtggaggttgcagtgagctgagactgtgccactgcactccagcctgggtgacagagcaagactctgtctcaagaaaaaaaaaaaaaaaaaaaaaaaaaaggccagtctcagtggctcacgcctgtgatcccagcactttgggaggctgaggtgggtggatcacctgaggtcaggagttcgaaactagcctggccaacatggtaaaaccccgtctctactaaaaatacaaaaactagccgggcgtggtggcaggtgcctgtaatcccagctactcaggaggctgaggcaggagaatcgctttagccccgggaggtggaggttgcagtgagccgtgatcaagccagtgcactccaacctgggtgacagagcaataacctgtctcaaataaataaataaataaataaataaataaaattcaagcttagtagaataaaaaattcagcttcccagttgtcctcgcatttcaggtgacaaatcatgcacagctggtggctttgtatcacacagtgcagatttagaccattcccataatcgttttcatcattgtagaaagttctattgaacaacgctgggctagaacattctagaagattctagaaagctccaacacaggagccagcagccacctgagggtaattacatttaaatttagacttaaattctgttggctggtgaagtccagcacatgctggtttggtttttttttttttaggggtgaggtagttagactgcagcaaaaacaggggctcccatcacagttctgtgcagggggtgagtgagactgaagaaaccaaagaccatatcccaattcactttctgaaatcatctcccgttattttcacctgttctctgattactctttgttccctgcgtgtgccctgtcatcccacctccacacctttgccatactgtctccctttgacccccacatccaaccagccctgtctagccttctgcagcatccccaagcagaattcactgggcagaattaatctctctctcctctgaactcctgattcacccatccatccacccatcccccttcctgtccacccatccacccatccatccatccaagcatccacccacccatccacccatccaaccatccacccactcatccacccacccactcatccacctgttcacccatccacccatccattcatccatccaacgatccacccacccatccatccacgcatccatccatccgtccatccatccaaccatccaagcatccacccacccatccatccatctccaaccatgcacccactcatcccttcatccatccatccatccatccatccatccatttacccaccctcccatccatccactcacccatgcacttgtccacccatccacccatccatccacccacccatccattcacctactcacccatgcacttgtccacccatccacccatccatccacccacccatccattcacctacccacccatccatccatccattcgtccacccactcccccatccccccatccaaccacccattcctccatccatcaattcacccacccacccactcacccatccatccatccatccatccatccatccatccatccatccattcatccactcatccactcatccatttacccaccctcccatccatctacccccccatccacccatccatccatccacccatccatccatccatccatccatccatccatccacccaccctcccatccatccacccacccatctacttgtccactcatccacccatccatccacccacccatccattcacccacccacccatccatccatttaaccacccacccacccacccacccagcaacacatccatccacctacccatctaatcatccatccatccatccatccacccacccacccatccatccatccattcgtctacccacccacacctatcccccatccaaccacccattcatccatccaattcacccacccatccactcacccatccacccacccatctactcatccatccgtccatccatccatccatctactcatccaccatccaccacccacccacccacccacccattcaacatccatccatccatccatccattcactcacctgcccatccacccacccatccatcccctccagaatgtaagcatctgacgtcagtgattgcgagggcgcctatagtgggccagctcttactgagcacttgccctgtaccaggctctgttgctcaccagctggtggtttacccttggttaagcccccaattccccatcctacggatgcagaaaccaaggttgagaaggcgaagtgacacgcccagggacagcccaggaaggtggcgcggcagacaggggctcaggcatctgactctagagcccaccattttcctcatgcatggtggacatggggcacggtctctaccctggggacatcccaagggacacacggtgtgtggatggtgcgttcttcccaccaagggacacaaaatgtgtgggtggtgtatccttcccacgtggagcctacagatgggagaaccacagccctgcccctcagtgtcccccgtgtctgatgagacctggaacaggggattttcagcagacattggactagggtcaccccaccatgccaagtccatgagtcaaaggaggtgaatgacaatagcaatgagactttgtgcccaggacacaggccaggcctcagcccttggcttccctgagctgtgccgagacatggagaggccaatgcatgggatccttgctttgccattgctgcccagcccctctagaaaattcttccagctccttggtcagaaatgtggtccctgtaggtggttagagtttcagttgttccaactgctattagctctgatgatggaaaggttggcatggaaaagttggctttcaggcacagctggatccagggcctcgtgcagcaactttaagaatccagactggaccggatgcagtgtctcatgcctgtaaccccagcactgtgggaggctggggcgggcggatcacttgaggccaggaattcgagacctgcttgggcaacatgaagaatccccgtctctacaaaatatacaaaaatttaaaaatatacaaaaaattagctaggcatgatggtatgtgcctgtggtcccaactactagggaggctgaggtgggaagatcgttgcagtccaggaggtcaaggctgctgtgagttatgattgcaccaccacactccagacagggcaacagagcaagaccttgtctcttaaaaaaacaaaaacagaatccatctctggccatctcttgtgctgtgcccaaaggccacagacacttcagactctcatgtgccagctgagcaaccctgcagtgggagtgagctcatccctcggatgtctccggaagtcctgggaccagcatggtgacacccctggcccctggctggggggcctcagctcctctatatcactacatcagaaacgcctagagcaggtcctggccagtctagacttgggccctgccctggcgggtcacccagcagcctccccaagctttgccattcccttccgccgggcaattccccaccccacctcccagggtctttgcgcctagctctgtcatgtcctctcttctcccaatttttttttttttttcgtcgttgttgttgacagagtcttgctctgtcacacaggctggagtgcagtggtgtaatctcggctcactgcagcctcaacctcactttgctcaagtgatccttccacctcagcctcccgagcagctgagactacaggtgtgtgccaccacgtccagcttcctcccagtgtggaggtgcctctcctctccccagcctcccctgcagttaggtgacaaactgaccccacttggggctccccggaagcagagctgctccatgacaccccctgaatccttgcagcaccagacaaaatcatccccttctgcccactctatcggaacccgggggctgcaggaaccctcatatccttccaaaagactctcctccacccctttgacatttgtcccatctttgatccctcgaccccttgggggctgctctcattctctccatgacccaattgcagagaggggaggggggcatccgcacacccgcccctccctgcggccttctgcagtctggctgaggcacgaagtcagcccaggtcacagggtgtgtggcctgcagccgaacccagccgctccgcacagctgtggccagacccaggttaacagtccctcccggctgggcgtggtggctcacacctgtaatcccagcactttgggaggccaaggcaggtggatcacgaagccaagagattgagatcatcctggacaacttggtgaaaccccatctctactaaaaacacaaaaattagccgggtgtggtggtgggcacctgtaatcccagctactcaggaggctgaggcaggagaatctctggaacctggcaggtggaggttgcagtgagtcgagatcacgcccggctaattttttgtatttttggtagagacggggtttcaccgtgttagccacgatggtctatgatctcctgacctcgtgatccacccaccttggcctcccaaagtgctaggattacaggcgtgaaccac[184 bp omitted]gcggcaggcacctataggcccagctactcgggaggctgagg[132 bp omitted]acaaaaaacactcattattagatttaaggcttgctctaattcaggatgatttcatcttgagatccttaattatatctgcaaagaccttttcccaaataaaatcacattctcactttctgggggactccttattttggtggggggactccattcaaccaatgacacgcccctcagtctcaccgagagggagtttgggcctcgaacaccctgcgttttgcggaggagggagttccaggccaggggcctgggtagggctgggcttgaactcaggtgtgcgtctctggtggttcctctctcctcctcgcctcctcctggaagctctccaggcctctcttccacacgtgcttctctttccctggtgggttctaagtcccaggcccctccccaaggtccactccccaagcctgcagcctgtgtgcccggccccttccttgtccccggagtggcccatcctgacacccaggggcttcctggctgttttgggatggcgcgctgggacagctcaccatgggtccagcctgtggtctttttttttttttcttttttttttttttttgagacggagtctcactctgtcacccaggctggagtgcagtggtgcaatctcggctcactacaagctccgtctcccgggttcacgccattctcctgcctcagcctcccaagtagctgggaccacaggcgcccaccacca[176 bp omitted]ctatatctggtggccccatgtgtctgtcatggctcccagagcagtggggggatgaccacggctcaaacgtccttcacagaccaggatgcatcggggtcaaacctgggacgggcatttccaggcctcagtttccccatctgcacgaccgctggacggtctgttgggatggatcccacacacccagagagctgggcagatgtccctgaggaaggacagcctgggtcccctttctctgtgggatccatggttgaacacccacagggatggggaggacctgaggtttgctcacggggagcccagctagaccctcccccacagacccaattccttcgtctggaacaagggacagtgcctggtcggggtgagggcctggaccacggaactggggggttgaggggctggatccgggtgtcccctgccccggggtctcccctcctggtgcccatcccccacaccacgctgaagccgtgtgctcacatgtagaaaagaggctttattaagaaggctttgaagtcaaaaaataaaactcttgatacaatttttttaacccttaaatcagctcagcaaatatataatcagtaatttagctgtgtaagattaaaggtccattactttatttaaaataaaatatattttagttcttaaaatttattccataaagtacatatttccctataaattccctacatatacacaagaggtaaaaagtaaaagtaaaaaaaaaaaaaaattaaaaaaattttaaaaatgacaacagaaaccgcagtaaaaaggggattaataattaacagaaagttagaaatttgattggaacgcccctcgcccccgcccccctgccccctccggccgcgcacggttgatgtacaaaagcataaatggttagccccaaaaagggagtaaaaatgtcaccctcctcctctggaacgtctgtgcggcctgagaccggccggcgagaaaagtcaaatcagaaaacggcttcggacgaaaggaaaaaacgctgagcgctggaaaagtcgtgttttttgttttgcttttttaaagatcaccctggaggggaggggtgtctaaaaataagaaaactaaaaaaagtgcaagcggaccttttctctccggtttattgtaacctgaccactcaatactgtcgttgaagggctgaggcgccgccgggctgcggggtctccgtctccacgcctgaggcggcagttaaagctcatctgtaaacactggccgccgcccacccccctgccccctcggcctccgcccctcgccccctccccgtccctctcccaccccgggtcccgccccgtctcccgcgcccacccctggcccccgcagatggccccggccacgtggtggtccgcgctctaggaaaagatatgaatggcctgggtggccggcgtgcggcaggcgggacactcgggctcgctcttgccgcagatgcggacggcgcagtccatgcagaagaggttgtggccgcaggggaccagcgcagccatcacctcgccctcggcgcacaccacgcactctcgcgccagggccggggccgaggacgccgaagggggcttgcggctgttctcggaggcgccggagtccaggggggcgcaggcggcggccgcggggctgctgggcagcgaggtggccgtggagaaggcggcgccgcctgggaaggatacggggccctgcgggggtcgccaggacagcgcgcccaccgggtccggggcgccacggcgagacagcgggagctccaggcggaggccgccgggctcgggcagcgtgggcgagtggcggggggtcccggccccactgctgcgccgggcgccggcggcgggaggtcccggggctccgttgaccgtggagcagccgctgaaggcgggcaagggggcggcgcgctcaaaaggcgcccagatggtggccgcggcgggcacggtcaggtccagcgccaggaagtcgaagtcgaagccgaagtcgcagtcgtcgggggcggccgtccccaccggggcaccgggaccctccgcgccgaaggcgaagcccccgttgccggagccgctgtaggggctggcggggcctgggtccggcacggaggggccgccgcggctgcccgcgtagaaggcctcgggggcgctgggggcgcccagggccgtgtccccgcggaggccggccgtggccgtggggggccgtcgtccctggttgggggtcttggcccagaggctggcggccgccccgagcaggtccaggcagacgtcggtgccgttggcgtggaagtcgctgtcggggcccgcgtcggtgaaggcgccagtgcgcagcgtgatgtgcgcctcgatctcctcgcgcgcgcggtccacgttctcgggcatcccagtgaccgcgaacaccggctccttgtcgcgcccgggcgtcacgatgtaggtgtgcgtccgctgctggatgcgcttgatggtggcgcccttgggccccaccaccagccccaccacccggtagggcacgcgcacctggatggtggtctgtccgggaaggttgggcgggccctgggcggcgccgggcagacccccggccttgctgcgcgtggcgcggatgatggagaagtgttcggccgccgacaggatctcacgcttggccatctccacgtcctccttccggccggtcacgatgaagaccggctcctcgccccgcactggggtcttgatgtaggtgtttgtcttggcccgcagggccttgatcttgcagcctgtccgggagggaggggaaggacaaggtgacccagagccccctgcgcagctcagccccgctgggcatgcaggctgcagggccagtgagggagcccctacctcccagcctgtgcccaacaacactttatcctcagacacgccacgtcccttcttccctcagcctcagtttcccctctgggctcgagtttggcctaaaagcaagacggcaaggggaccctgttttaggttgaaaggtgtgcgccataatttatgttcccctggaaccgcagtgtgacggctggggtgtgaatgtttcccccaagttcacaagctggaccctaatatgcggcgttgacagtattaatttaatacgtagggtcggctgggcccgtggctcacccatgtaatcccagcactttgggaggccgaggcaggtggatcacttgaggtcaggagttccaaaccagcctggccaacatggtgaaaccctgtctctactaaaaatacaagcaatcatccgggtgtagcggcaggcacctgtagtcccaggtacttgggaggctgaggcaggagaatcacttgaacccaggagacgaaggttgcagtgagccaagattgcaccactgcaccccagcctggacgacaaagcaagactccaactaaaaaaaaaaaaaaagcggggtgcagtggctcacccctgtaatcccagcactttgggaggccaagttgggtggatcacgaggtcaggggctcaagaccagcctggccaacatggtgaaaccctgtctctactaaaatacaaaaaattagccaggcgtggtggcaggcatctgtagtcccaggtactcgggaggctgaggcggaagaatcgcttgaacctgggaggcagagactgcag[132 bp omitted]tcccagccactggggagggctgaggcagaaccgcctgaactcaggaggtggagggtgcagtgagccaacatcatgccactgcactccagcctagccacagaccaagactccatttcaaaaaaaaaaaaaaaaaaagagccacagtggcagggtcagtggctcacacccgtaatcctagtacttcgggaatctgaggcaggaggatcactggagcccaggagtttgagaccagcctgggcaacacagcaggaccccatctctactacaaacaacaacaaaaaattagccaggtgtggtggtacacacctgtagtcttagctactcaggaggctgaagtgggaggatcacctgagcccgggaggtggaggctgcagtgagctatgatcacaccactgcacttcagcctgggtgacagagcaaagccttgtctcaaaaaaagaaggaaaaaaaaaaaaaagacacacacacacagagaagctggccttgtggagacacagacagagactgcagtgatgtctctacaagccaaggactggccatagcccccggaaactgaaggcgccccccgccctgcccacaccttgacttggaacttttatcttacagaaatgagagaggagacgtttccatggtttcaagcccccattgtgtcagcccagagagcaactggagaccctctgacaccacctcccggcccaacaggaggggaagccgaaattcagattgtggaaactgcctacaattttcttccggccaaatgaccctccctaggctaccaagaccctggcctaaggggagccgaggtctcggcccgactgcagacgcccgcaccctgactccagatgcctccgaggcatccaggtgggccctgaggggcctgctgtggctttgttcttgttggctgggctgggggtctgacctggtgagggacatgagtgtcagtgtgggaggcagggctctcctcaccgattgtgtaggcaaccgctgaccaggtatggccttcttggggtcccagacatccctaccccacccctggggccttaatggtttttttttttttcttttccttttttgagattatctcactcttgttacccaggctggagtgcagtggtgtgatcatagctcactgcagccttcaactcctgggctcaagtgatcctcccacctcagcctccagagctggcaccaccatgcccagcttaattagttattgagacggagttttgctcttgttgcccaggctggagtgcagtggtaccatctcggctcactgcaacctctgcctcctaggttcaaacaattctcctgcctcagcttcctgagtagctgggattacaggcgcccaccaccacacccagctaattttttttatttttagtacagatgggattgcaccat[138 bp omitted]ccaggctggtttcaaattcttgggctcaagcagtcctcctgcctcggcctcccaaagtgctgggatgacaggtgtgggccactgcgcccggcccgtgaaggagttttgagccactgctcacaacccctcaggctctggggaagcagagggagctgcagggatgtttcaatacagtcagaaggtggctctgaggggaaaacagtgttgctaactctcccacagtgcaagagatgaaatgagcaggatcagcacttttgacggggaagaagtcagaaactgcctgggccaggaagatggaaggcgtgggacctggaggctggtggtcccaggggctcggtagggaggaccctgggaggggtggcgggggtgcacccactcggaggaggacagcagttttcccgccccagctgcactgccaccacacctgtccctcccagtcgcagcattctgttcacctccattgcacccagtcccctccattcttctgtacagtccggtgtccccctcctccaggaagcccaccctgactgcatcgggttgggcctgctcttctgagtctctcctaacatgcctgactctctgagctgcctccctgaggctggaggatggggctggggattccctcggcacttgggggaccttgctatgcctgtttcttcactgtgaaaggggaaggtaacaggcctggcttcacaggcccggcttcacaggccctcagagggccatgaccaggccgttggctcctggcagccaccctggcaggtctcactgcagcccacagtgtttgctttagatagatcctccttgaggaagggaaactgaggcacagggagtggagacccagcaaggctggggaaggaggtgccacccacagatggaggctccgctggccctgcccacaggcaggaagtgagcctgttccccatcacgccgacccggcagagggcagagcccgccagcgttgccagggtgcagcatggggtcctcccttgctgatctgggagccgccccgggtccccagagggtcacacgtgggagaggctgccccgacgtggccaccgctgagctcacaggctgtggtcacagaaagtctggtctgggtgagatgacaaatttgggagatggaggtggcaaggaagggggcgtgtgactgtctgagcagaaaccaggatggtgctgggagccacgcgtgcgtcggggcaggggagggaactggcgcctccccctccccttactccatcctgccctaacccagacggtggcgctgggtggagacctcacagctagaaggcctctaggacctcaaagacggagctggagctcaattcattggtgctgcgtctgctttgacacgtgctggcccccaaaactccacccacatcaagacgccaaggggccaaggaatcggggctccaggagtgatcccagcccacccctgccccactggaaatgacacagcgaggctagagggacaggaagcctgaagggcgggctctgggggacaccgaaggttggcaggcactgaaatgcagattcgtgggccatgtccccagaattccaactcggagggcttgagatgcctgggaatcggggtgaccaccccagagtctggccctgacctgtcccacacccccaacccacagcagccaagtctccccctaccagggccccacgcagcacacacaccagcgggcatcactcatccagcccgtccagggtcctggctgcaatgaccgtgcactacgacttaccaatgaaaccacaagtcctggtgtgggagccgaggccaccagcccaggctggatgggtttgccatggcaggaaggggaatgtgaaccccagggagccgctgaggcaacagcaaggacaggattctagaagcaggacggggcgagaacaaggcctcacagccaacactcagtccaacacgcagccgcccccagccaggcagccgggtgacgcgggacagcagcatcccagacctgggccactatggaagccagcgggagctgaggggtctggtggggaggagggaagctggttcagctgtcaaacagggatgtcaaaaccccctcccaggccaggaacagtggctcacacccgtacgtagttccggcactttgggaggccaaggcaggaggatcacttgaggccaggagttcgagaccagcctgggcaacatagcaagatcctgtctctataaagggtgtcacctgtcgcccaggctggagtgcagtcacagctcactgcagccttgacctcctgggctcaagccatcctctcacctcagcctcccgagtagctgggactacagttatgcaccaccacccccggctaattgtttaaagcttttctgcagagacagggtcttattatgttgcccaggctggtctggaactcttgggctcaggtgatcctcccatctcagcctcccaaagtgctaggattacaggtgtgagccaccatatccggcctctacaaaaaatttttaaaaattagccaggtgtggccgggcacggtggctcacacctgtaatcccagcactttgggaggcc[134 bp omitted]gaggcagaagaatggcgtgaacctgggagatggaggttgcagtgagctgagatcgcgccactgcactctagcctgggcgacagagtgagactccgtctcaaaaaaaaaaaaaaattagccaggtgtggaccgggcacagtggatcacgaggtcaggagttcgagaccagactgaccaacatggtgaaaccccatctccactaaaaatacaaaaattagccgggcgtggtgg[131 bp omitted]caaaagaaaagaaaagaaaagaaaattagctgggtgtgttggtgcgcacctgtggtcccagctacttgggaggcagaggtgggaggatcgtctgagcccaggaggttgaggctgcagtgagctacaatcacaccactgcactcaggacagagcaacagaaccagaccctgtctcaaaaacaacaaaacaaaacaacaacaacaagaaaccgctaggcgtggtgactcacacctgtaatcccagcactttgggaggtggaggcaggcggatgacctgaggtcaggagttcgagaccggcctggccaacatggcgaaaccccgtctctactaaaaatacaaaaatgagcctggcgtggtggtggcagatacctgtaatcccagctactcgggaggctgaggtgaaagaactgcttgaacctgggaggtggaggctgcagtgagccgagactgagccactgtactccagcctgggcgacaagagcaagaccctgtctcaaaatgaaaagaaaaaaacctctcggggaatgaagggaacatgtacactgtactaacgccagaactctcagttgggtctgcagtgtggaggtttcctagcagagcctttcttcctagggctctgcagtgtatggacaggaaaaccatggcatggtccccaccaacaccccagcactgtccccagctgtcgggaaaacctggggcctgcggggatgggaggagaagaggagcctctggggctgcagccaggaacaagggacaggaggggagacagtgagccaggggtcgcccccagctgaggggaacaacctaaaatcactagccttagcctgtgccgacagcagagagagcgagccctgagcagcttccagtccaggccctgccttcaacatcactcactcattcattcattcattagccacagaacaccttctgtgtacaggccctggcaagacactgaagacccaaccatgaccaagcacctgccctggttcctgtccctgggaacatgcagggggagaggctgccacggagcacagattcacccagggtgcctggcaagcggggtgagaaaggagggtacatgttggggtctcagcaggagcagggccggaggtcccctagagcacctttgctggccggctggagggagacgcctgtgcttttgggtctccactttgcctgtctcccagacagggctgcctcccctcacccccagccctcaagctttggaatctgaaattttctttgctgacccaccagagaaactgggtttgaatcccagcccatgatttttgttttgttttggagacagggtcttgctttgttgcctagactggagagcggtgacaagatcatagctcactgcagcctcgaccgcccaggctcaagtaatcctcctgcctcagcctccagagtagctggggctgcaggagtgtgccaccatgcctaatttttgtatttttttttttgtagagacagggtttcgccatgttggccgggctggtctcgattcctaggctcgagggatcctcctgcctcagcctctctgagtgctgctatcccctcagtttttacctattctttacctcttgcagcctctgcctccccatctgtgacctgggagctgcaggacctttcctggggcacattatgggcctcagtgagatggggcaggtcaagtctggcataggcttagcacacagtagaccctcaataaagatctagccaatggccaggcgcagtggctcacacctgtagtcccagcactctgggaggctgaggtgggtggatcacctgaggtcaggagtgtgagaccagcctggccaacatggcgaaaccccgtctctactgaaaatacaaaaaccagctgggcatagtggcacgtgcctgtaatcccacatactaggggggctgaggcaggaggatcgcttgaacctgggaggtggagcttgcagtgaaccgggatcgtgccattgcactccagcctgggcaacagagcgagactccatcccaaaaaaaaaaaaaaaaaaagatatagcaaatgaatgaactggagcctccagcagatgggtgggaactcagagggtttgaatgaccacagtctgcccagaaagcactcggaccccctctaggatcaagagaactgaagctcagagaacagcacgtagctactggggagagggctggtgccaggcctgtgtgactcttgtctaggtggggaggccggacaggtgcacccttcctggcctccagggaaggggtaaccttggagcttgggtttgacagagaagcatgagaagttcagagagccccagggtggagaggaaggtgagtaaaggggcagggccggggcacaaaggacattgaaaggtatgcttgagaacggggtgggtgggagaagctgggagccacagatggttctacagtgtggaagaagtacagactaccgaagctgtggaagacgtaaggactactgaagctgccaacctgtcctggcatccacagttgcatccctggcaacgcgcactccacttatggggtggccactgtgtgtgacctggagctgggattaaaaccagcaacttgggtccaggcatagtggctcacacctgtaggaaccccagcactttgggtggctgaggatcgcttgaggccaggagttcaagaccagcctgagcaacagagcaagaccctgtctctacaagaaaaactttataataaaaacaaataaataaaactggccgtgcgcagtggctcacgcctgtaatctcagcactttgggaggtgg[134 bp omitted]gaggcaggagaactgcttgaaaccagaaggcggagtttgcagtgagcccagatcacgtcactgcactccagcctgggcgacagagcgaaactccgtctcataaataaataaataaaaccagcatcttgccccagaatcctctaccctaatggaggtgagacgtccgcacatcacagagaggggccgtcatctgcgcagggccacggcggcctgcaggacaagcaatcagggcccactctacccccgacccccactgtaccccagggcctgccttgctgacggccaccagcaagagcccagtaagtgggtgcagaacgcacaggccagaggtgggggctgagcctggtgcccacagactccatttcccatggacctgcccctagagaattcccaccctgaggccacaggtctagaagctctcagcctgacgctgattcctgccagctccccatgtggccatagcctcgctcaaaggcccttgggtgccaggacaagcgcgttcacaaagaacacagccacagcctccaccacctggaggctcaggctcgtgcctttggtcacttggtccccaggcctcggcttggacgcctgtctccacaggctcccagacactccgcacagggcagctgtcccgttctaggccctgggtatgggacatggaggccgggtggaaggcctcaatggggaggcagtaacaggatggtagggcgccctcctgccagggggtcccaccaagggcagccagcaggactgagacagaacccagtccctccccacccaccactccagagcatgcttcctggggccagcaccatgcctgaccctccgtgggtccccacatgagctggacaaatgaacgaccaaaagacaggaggctgtggtgccccacccacctggaccgagggaaagggcggaggggagggcgccctggtggtcccccgcctgaggccagggccatagatgaccttgcaatcccagccccccacacctttctctggcctggattcccgagggccccggggaggcagggacccccagcccaagtgtcctgcggccccaccaccagccccgccaaggccccaccccaagttctagaacctggctgatcactggcggtcagcggggacccaggagcggggaggggtggcgggaaggcaggagaaagttgagggaggcaggcgggcgggtggctaacggggtggtgggtgtgagctgggccaggcactgcccaccacccgcccgcccgccccgcagctcgggggccaatgagcagcggccggcctgatgtcaccctgcaaatctcagcctcgctctctaacaaagagaacaatggggcggccagagggaagctccgacgatgccaccgctggaccccacacccggggcctgccgcccgccggcctgcccagcaggctgcaccccagaagtggctttgacagccggtccttccccaggccccgaaatccctgactcggggccagagagtggagcagggaccctctcctgcccggtcccgtccccaccccagtcagggccccaggctggagactgagacgtgcgctctttgtactgtcagccttctctcccggtcctgcaggcggcccccctaagccacccctaaacctgcgcttgccccgccccgccgcctgtgctgggtgtggggcgccccccgcccggccggagccccgggccctcgagcccctctctggggtgcccctgcgggcggccgagggcctgggctgcggcgcggctccccggagcctttccgggctggaggcggcccagacaaaggcggcggcggggccggagcgcgcaggggaggagcgcgggctgcgcccaactttctcccgcggcggctgcaggacaaaggcgcaaaggcagcggccgaggccggagcccacgcggggcgtgtccggtgcggggcgtccggcgcgggctgggctgggctcgggcgacccccttccccggggcggacggtgcggggacccccaggacagcaacccccgacgagggccactcaccctggcgacccacgatctcggcgacgtgctcggagctgggcaccgggacgcactcggtcatgttgacgcttttcttgcggctgccgatcacgctcatctggtcggccagcagcgtcgggggccccagggccgcggggtggggcgcgaagcccgcgaacacgtcggggggcgacggccggggcggcggcggcggcgggggactcgcgttggggtccagcagcggcagcgacccgggggccacggcgggggccagggtcgggggcgcgccggcctcaggtccgtcggggggcacaggctccggagccgccccgccgtccgcgccccccgccgccgctgcgccgtccccggccgccccctcctcgtccgtgtcgccagcgccccccagcccgagcgccgacagctggtccagcgccaggcggagcgcggcggccgcgtcgtcgggttcgggcggcggccggggcgcgggcgcggcctcctgggcgccctcgggcgggggcgcaggtccgggtccggggtcctcccccgccgcccccacgccgccgccgccgccgcccccgcccccgccgccgtcgggctggccgagcgagctgggcatggcgggagctagcgctggggcccgcgctcctgccgcccgcgccgccgccgccgcccgcgccgccctccgcctctgcgagctgggccgccggccgcctgcatccagcggcgggggcgggcacggggggccgggcgggcggggcggcggcggcgcggggctgctcggggccgggccgggccgggccgggcggcggcagcgactctggctgcggctcggcggcggcggcgacggcggcggcggctcctcggcggccgaggcggcggcggcggcgcgggacgctccttccctcccgccgcctcccgcggccccgccccggccccgcccccgcgacgtcacgccgcggcccaacaatgggcggcccccagggcgcaggcgcgcggggcggggccggggcggggccggcgccgggcacgtggtccaggccccgcctccgcccggcgctcgggcgggaacccgggcgcatccgcacgtgcgggcgctgctgcaggtgtgtgcggctcagcccctgcctggacagcgctccctccccaagcctgagagtccctgcctcgcgcgccccagggcccgaggtcccgctccccaatttcccctagagatccgggtcgcccccaagcgaggtctcttgctccacgcccgcttccttgtgccagggacccccacctccctgcataaaggcgtggggtcctctccaagtccccctcgcgatcccactggacttcgaagtcaggctcctgcccgcccaccgcctctgtgccagggtccaacccccgccccacggtgcaccccccagggcctggggtcccagtccccaagtaccccttgctatcaggtgggctttagggtcaggcccctgccccacccccagcctctgtgccagggacagctccacaatcatgcacaccccagggcctgaggtccctctcccctagtctctcctagctcccctctggctggctcccggctttgggatcaggccacctcctccacgccacctcctccgccccacccaaggccacagacccggtctctgtgcccccagccagagacctctctaccacagtggtgcttccatggcgagggcaggctcacaccagccagaaccctccatgtggagccccaccctcttctggggtgcctttccccgcaacgggcgttgtccacct[138 bp omitted]acaaaaattagccaggcgtggtggcgcgcacctgtaatcccagctactcaggaagctgaggcaggataattgcttgaaccctggaggtggtggttgcagtgagtcgagattgcaccactgcactccagcctggttgacagagcaagactcctctcaaaaaaaaaaaaaaaaaaaaaaaatagccgctttcccagcggctcttcctccagctgtccttcggggccttccttgcacctgtggggttttttgtgataaacctgtctggctgggtctacctgcccccctcttctaccagacctgtccctggctggctgtgcaaacttggaccgaaggcagggctctctgggcaggagtggggcagcctgcccctttgcctagcaaggcttctcctctgtcccctccccccgcctcacacaccctgggtccccctcagccactcttctagtccctcagccacagccacccactgctgggcccttcacttttggtggcttctctgcccacttcttccaggcaggcagggtcaggatccccctgcctggagcccttccccacccaaaatctctctcctgaccccaggctgcatccagccccacttcccctcctggggtcctggacttctctttcgtgcacgcccatgcttggaattgtttttctatctctctttctttctctctttctttttttctctttctttcctttttttctttctttcttcctttctttcttttctttttctttctttctctttcctttctttctcttttttcttttccttttctttctttcctttttttctttctcttccttttcttttttctgtctttctttccttctttcttttctttcttctccttccttccttgcttccttccttttctttcatcctttatttcgttcttcatttcttcttttctctcccttccttccttccttccttctttctttctttttttttttttagacggagtctcgctctgtcacccaggttggagtgcagtggtgcagtcttggctcactgcaagctccgcctctgggttcacgccattctcctgtctcagcctcccgagtggctgggactacaggtgcctgacgccacacccagctaattttttgtattttttgtagagacagggtttcaccgtatcaaccaggattctcccttccttctctgctcccctcccctctcctctcctttccttttctttctttttcggacagagtcttgctctgttgcccaggctggggtgcagtggctattcacaggtgtgaccccaggacagatcagcatgagagctttgaccagctccgtctctgacttgggtaggttcagccctccttaggcaacctggtggtcctcccagtccagggaggtcatcatattaatgtagacgctggatcagcatagctcactacagctcagaactcccgagctcaagcaatcctcccgcctcagcctcctgagtagctgggaccacaggtgtgcaccaccacaccgggctactttttgtatttgtagagacagggtcctttttgttgcccgggctagtcttgaactcctaacctcaagcaatcctcctgcctcagcctcccaaactgctgggactacaggtgggtaacactatgcccagccacttgcaattattaatggcattgtcagccgggcgccgggcgcggtggctcacgcctgtcttcccagcactttggaagtccaaggcaggtagatcaccttaggttaggagttctatatcaacctggccaacacggtgaaaccctgtctctactaaaaatatgaaatgagccgggtgtggtggcgtgagcctgtagtgccagctgcttgggaggctgaggcaggagaatcgcttgaacccgggaggtggaggttgcagcaagttgagatcacaccactgcactccagcctgggcaacagagcaagactctgtctcaaaaacaaacaaacaaacaaagaaaaaaccctgtgtctaataaacaaatgaatttatgaatgaatgaagcaatgaatatttaattctttcccagttttggagcctcagagtcaaaactcaaggtgtgcgcagggccgcgcccccttcaaaggctctggggagcgtcctttctgcctcttccatcttctgggggctctgggcctcatcgctcattgtggcctcatcgctcattgtggcctcatcgctcattgtggccgcatcgctctgacctcggcctctgtcttcacacacccatgtctccctgtatgtgtcctggtttccctcttctcatgggaacaggagtcacgggatgagagtccaccccctcccgtacaactttggcttaacttgtctgcagagaccctctttccaaacaaggtcccattcagaagttgtggggttgaggacacagacatctttgtgcggacatgattcaacccataatatacctccttggttgtgacagcccagatgcccacaaacgtggcccctgggcccagagtcacctcaggtgggaagcgctggtgtaggtggtggcactattgtggtcaccgtgaaatgtgaaattctctcaggcccactctgcatctgatgttttttactttttcttttcttttcttttcttttttttttgagacggagtctagctctgttgcccaggctgcagtgcagtggcacaatcccagctcactgcaagctccgcctcctgggttaaagcgattctcctgcctc[134 bp omitted]tggcctcccaaagtgctgggattacagccatgagccaccacgcccggccgcgtctgacattttttcatgggagaatgttggaagaaaatcacataggaagggaggcattttgaccgggcagggtgggggttatgggagacaagaggagccgtgatcatcgctgatgaagcccaggggtgggcctgggggatccattgtcttgcttaggatacagtttttttttgtttgttttgtgtttttgagaacggagtcttgctctgtcactcaggatggagtgcaatggcgccatcttggctcactgtaaactccgcctctcaggttcaagagatgctcctgcctcagcctcctgagtagctgggattacaggtgcccaccacgcctggctaatgttgtatttttagtagagaaggggtttctccgtgttggtcaggctagtctcaaactcccgaccccaggtgatcctcctgcctaggcctcccaaagtgttgggattacaggcgttagccaccgtgtctggcctatttattattattatttttttgaagacagaatcccttcactctgtcgcccaggctggagtgcagcggcgtgatctcagctcactgcaacctcttcctccctggctcaagggattctcctgcctcagcctcacgactagctgggactacaggcacctaccaccatgcccagctaattttcgtgctttctagtacgtgttggccacactggtctcaaactcctgacctcaagtgatctgtctgcctaggccctgcaaagtgctaagattacaggcgtgtcccaccttgcccagcctgtacaaaaaatttaaaaattagccgggtctgatggcacacacctatggtcccagctacttgggagtctaaagtgggaggattgcttgagcccgggaggcagaggttgcagtgagctgagattacgccactgcactccagcctaggtgacagagtgaaatcctgcttcaaaacaaagaaaaaaaaaaaaaaggccaggtgcagtggctcacgcttgtaatcccagcactttgaggggccaaggtgggggcagatcagtggatcacctgaggtcaggagttcgagactagcctggccaacatggcaaaaccccgtctctactaaaaatacaaaaaattagccgggcgtggtggcacatgcctgtaatcccagctacttgggaggctgagacagaattgcctgaactggggaggcagagattgcagtgagccaagatcgcaccattgcattccagcctggcgacaagagggaaaccccatctcaaaaaacaaaacaaaacaaaacaaaactcagaaaggaaaaggaaaatgcacagggagaatcctgtgatggagaaggaaggcaggcaggacagcagagacaggagcattttattgcttgtaaattacatctcaaaaaacccacttcacacacgttaactggaaatatcttcaaatgaacggccgtgagcgtggttattttggtaaccagagaaggctaaaaattaaaactgtgaaaattaaaactgagcagggaaggcagttttgtggtctcatattatttgccctcaacaaaattcttttgcccgtggccaacatggtgaaaccctgtctctactaaaagtacaaagattagctgggtgtggtggcgggcgcccgtaatctcagctactcagcaggctgaggctggagaatctattgaacccgggaggaggaggttgcggtgagccaagtttgcaccattgcactccagcctgggcaacaagagcgaaactccatgccgaa[132 bp omitted]gaaaccccgtctctactgggggtggtggcatatgcctgtaatctcagctacttgggaggctgaggagggagaatggcgtgaacccaggaggcagagcttgcagtgagcagagatcacaccattgcactccagcctgggtgacaagagtgagactccatctcaaaaaaaaaactgtggaacattatcattaacttttgtgggtgccctttagccatttcccccagtccccataatccccagtcactggcacccacgtgtccccttcctgtctctgaatcggcctgtcctggacattcacacaaatgggattgcacgccgtgtcggtgtctgtgtgtctcttgctgagggtggactcctccaggggcatctgcgccgtggccggtgtcagagcctggttcctgttcatggccgagtcctgctccatggtgtggccgggccgggctgtgttcgttcatccctggatgggcacttgacttgtttacactttttggaccccttgaatctggagcgagtgtgacagaatctcacaggcagtgcccagccacccgctaccagaaagctgagtcttgctccggtatggccctgtccgaaagaacgttccggaagctgggggtgttttccatgggcacctccgggctcctggagatttgctgtgacagccatgagggacacacacaggcgaggggcatccccggggatctttgcggtggcgagtgtgtgcggtggtcagaagggctgtccctgtctgcctgggtctgggggctgcagggacagcaaggcacgggccctgggtgtggcaggagaggcatgatgccccttagctggtgttgctgagactcgggagccctgtggtccgtgtggctgggccgagggctgggaggtgcatcctcgccacgggggtcctgagcctctcctccctggtaccctctgtggcggcagcggtggggagcttggtctgaggggaggcgggggacacgtgaggctcttgctgctgctggcaagtgccagaagggctgccatggtggttcacacctgtaatcccggcaatttgggaagctggggcgggcggatcacctgaggttaggagttccagaccagactggccaacatggtgaaaccctgtctctattaaaaatacaaaaattagctgggcgtggtggctactcgggaggctgaggcttgaacccagaaggtggaggttgcagtgagcccagatcacgccactgcactccagcctgtgcaacaagagcgaaagaagagcgaaactcttgtctaaaaaaaaaaaaagtcccagaaggtcttggggctgagacatgggcggggctgggggcagccaagtggcctttgaggatggggccaggcaccgcacagggcaggctggtcatgaggcccccacgaaagatcccagcattgggagctcaggcttccccgccccatgccaggtctgggttctggggctggagtgtggagcctcggtgcgcccagggggttcagcctgagggtctgagacttttccagggcagggaatttgacgagggcctgagcactgggctggcccctcaggtgcccacgcctacaactcacttctcaccgggcacgacctctagcaaaggccagtattgccttggcctgtgggggtccccaaggtttcagggagagaggaaaggaccctcaagcttcgtcaacagcgacagcccagggcctggatgggcttccagtggggagggccctgtggcaggggtagggatcatcacatctcagaccaaggccaggacatggccagaaccccgggatcagagggactgatcggggtctgtcagtgacaggaagctgggctgcgacagagagggagagacagcaagagacagagacagagaccgagggagagagacaggagagagagcaagaaacaaagagggacagagagggagacggcgcaagagagagacaagagggagagatagagacagggatagacagagacagagagagaccaagggagacagggacacagtgggagatgggaagagggaaacagagtgtctctgagtgccgggcagatgaggggagggtggcctcccagccttcaggtccagaaagcagcttccagtggccatggctagtgagctgaagtccagggtcccggggcacagctcccctccctgcagcggctgtgcaggacctgaggacctggggggccctccctgccaggcagcccctcctgcttcccttcctttggaaggagcggtgctgggtctgagccccagcccatcttcctcaccggggcagcagggccaagacccacgatccctaggctgagccagcggcacctcagggggcacggcccttgcccacagatgcccaggccggcctggtcttctctgaatacccctaagcctgactcttgggttgtgaatgtccgcgaggttgggggacctgctggccctgtccccacaccgctttcagcctttcatcacccaaccaaagacagaagctcaaacgtgggcaccaaagtctagcggacgcaccgaactccaggctccaagcacatccacccatggtggctttattcagtcacgtccccacgcccacggctccctccaccaggcagacagaggggaggccaccccactgcaaagggtcccagccagtgggcaccaacctcaggaagacgtggtccccacctggagcttccctcggctgccctggcccttgagcccgtcctgaggatttgtgctttgactctgacagggagcagcaggaagctgccagcccactgcctccatgcgggtccttggagggcagacggtggagcggcgcttcctcagctcccgcggtcaggccccatcagggatggtcacagtccagccacaggggcgactctgcccatcagtccccctggggcagcgaccagatcctggctggggcagcaccgggacaggccctctctatgggcctaaggtcaatgcaggtgggggctcgctgggcccaggccaatgaacccacccgtaggagccctcactgggcagcagggccaggagggcaccagggactggccgcagagtccactcggggcaggcgtctgtggcttggaacctgccctcgccaaggcactggggggttaaggagcagatccctcagacggccttgggccagaagctccctggagagctgggcacctcgaggagcgtctgggagcctcaccctgtcccagtggctcctggcacccctgggagcgtcagcaccaccccaaagctgggtgcctgtgtcgccactaaacagaagggaaaccgaggcaggggggccggctggcagtggagcattctggcagcgccgggcgaccaagtcccgactggcagcggctggagtttggttttcagaagcgaaggctggcgttggcacacagggaaggctgcccgatgacgtgcctcgactgtgttacatttactgaaggagagcggcctcctgggcatgccactcaggcacggtgaggctctgtggcaccaccagccgcatggcagggcagagagtggcgccgtcctgcatgccccccacagcagaccagagtcccgtcctcacgctgcacagtgggtgatgtgagtttcaaaactacgcctccagaccgagaaaccctcccagctgtcagcaagccgtggcgccgagctgccgggcacctgctggctgctctccagtctcaaggagctgggacagcgggcatggggaggagctggcctcgagcccaaaggtcgtagggagccaggcagggcccaggagcacccggcacttcccgaagccggactctgtagaggacgagcgtggagggtctttcgggtgggggcagccccagctgtgtgccccgaggccccgggaagtggggacgggccgaggagggagccaggagcacggccttcctcctgggtgtctccaaggctgggcttcgccgccgagcctggttcacgtggggccgaggaccgcgtctgcaggcggctccagcaggcagcacgggctctcggcagggcctctggaaaggacagggagggctggctttagcgactccacgggacggggacgcttgggctcttctagggagatgggaagctcttgggaggcacccgtcatcccaagcacatctgtgttcaccaggcagtccccactgccaggacccgactccagggagcccccgtggccccgcagcacctgccctagacgtgctccatctccgggtccgggtcgggctcctcctcctcctcctcctcgtcttcctcgtcgtcgtcctcagcgcaggccttgtccagcggcgcctccccgtcacgggccagctcctccacgtgcgccagcatgtcggccatcagcgcctcctccagccgcttccgcacctgctgcaccagctcttcctgcttcctggggacacatggaccttgcgttacaccaaggtgagcggccagcaggacatggacacaggatgaacgtggggacctcagctgggaggggaggcccgagggatccacaggcacccccccaggaccagccctggcccgtgccacccctcccttcacaatccacgcagagaatgaccggctgccgctggccatcgccagcgtccgccaccctcccagatggcccccctgccacctctactgggaccaagggaggggcctgacccttcagtccccagacttggccctgagcctccccggggctcagctgtgtaaacccttgctcctgtcccttgac[132 bp omitted]cgaaaccccatctctactaaaaatataaaaattagctgggcgtggtggcggccgcctgtagtcccagctacttgggaggctgaggcaggagaatcacttgaacccgggaggcggaggttgcagtgggctgggatggcgccattgcactccagcatgggcaacagagccagattctgccaaaaaaaaaaaaaaaaaaaaaaaaaaaagcaagcctcaccaaaatcagctaccatcagcccgcagcagcccccaccctcgcaggccgggggtcacctttccgctgcccactatgcaccagcgtgtactcctttaccatggctcgggcggcctgagaaaaagaatccacaccctcgtctcaacccaccaccagggatggggggcctcctcctcggggcctacaagctgatgccaggcactccagggtggccgctcctctgcctgccgcctccggggccgcagcacgtgcttctgcccacctccctctccggctgcccaaagagcccgtctctgttctgctttcagtcccaggcaaagctgactttgtttctccccagttgtggccgaggctcagccgccccctgcctccggggtctctctccagcggctcctgcagacctgagctgctccctctcactctgtccccaccacccggaacaccctggctcacctactcgactgcagccaccacctgctcgtcatctttccagacaggaccctacctcctgcggaacccaccaccgagttcctcatttcaatgcccttttctatttctataagttcttattttatttttttaactctgtcacccaggttgaattgcagtggcaggatctcaactccgcctcccaggctccagtgattctcctgcctcagcctcccgagtacctgggactacaggcatgtgccaaaacacccagctaattattttatttttagtggagacggggt[138 bp omitted]atctgtctgctatttttcacagtcttgttcttttcttttgttgacaattcttcctatttcaccatcttcatttcgggaagttctctgagcgcgcagagagtgtaaatggacctcaaacccaaaagagggggcccagaggtaccacggccggaggaggatgccgccagccgctccggatggaacccttggcgcccacagtttgtgtgcttgtgggggtggcgtctcaggtccatctgttcaccctgtgtgggggcacagggtctcttcttgtgcccaggggcctttaaccccggctgctgccacaggaaacccgcatgcccagcgcctccctggccgttccgggtcttggctccttctttctggaaccgtcaagtttcctttccttcctctgacctaagccgtgtgctgcactgaacgtgaaaggtcccgtcttcgctccagcacttccagagtttcctgcaggcgcctccgtcaccaggcggccttgcgtccactctgcacactggaagtgggttcggccctgaggccccgcaggagggccgctcacccctgggctgctcagcctcacctgactgttgcctgtttctgagcggccgtgttccctgctgttcgttccgaggctctgcacatcagaactgcccctcagcaggcacccagagccatctccctgaaggcagagactcctggcctgccctgtccctccgtctccagggcccaacatggagcccagcacccagcatagccagtcctcacggactcaaaggaccacactcttttcaagaacattcctccaaggggtgcctggctcgccctgaacccaggacgcgggtgaaacggttcatactgctccgacgatgggtccccttgccctggctgtttctgtttcaaaaccccagcagcatcgtggggagacgggaagcacgcaggcacacggggacactcagggtccccacggccacaagagacagggtggagcagcaggggaccaggccaaggggctacctgatgtcctcgtcggtcaccatgaaggctttgcacaggggctgcgtggtgttgagccatacgccggggttcttctccacggcggccgagagctgtcccgtgatgggcatggtgctagtgtgcagggcgctggcgatggccgacagcagcgtctcatccgtgcagccaggtcccacccctgccaggcagtggacaaacagccgcaagtggagaggtcaccacggggcagctgtggcccagacaggccacggaaatgccccaagaatgggagctgccaccttcttggaaggaaccccaacttgggttccatttctaaattccctctcccgcttgtgttactacattcataacagaaaaaaaagcaagttaggccaggcgtggcgactcccgcctgtaatcccagcatcttgggagggcgaggtgggaggactgattgagcttaggagtttgagaccagcctggacaacacagtgagactcctgtctctacaaaataattcaaaaattagccaggtgtcacgctgcatacctgtggtcccagctactcaggaggctgtgctgagagaaccacttgagcccgggaggtagaggctgctgtgagtagtaacggcgccactgtacttcagcatgggccacggagaggctgccttttgtttttgagatggggtcttgctctgtatcttttttttttttttttgagacggagtctccctctgttgcccaggagagtgcagtggtgcgatctcggctcactgtaagctccgcctgccaggttcacgctattctcctgcctcagcctcccaagtagctgagactacaggcggccgccactacacccggctaattttttgtatttttagtagagacagggtttcaccatgttagccaggatgatctcgatctcctgacctcatgatccgcccgccttggcctcccagagtgttgggattacaggcgtgagccactgcacctggccttgctctgtattttctgtagagatggggtctcactatgttgtccaagctggtcttaaacttctgagatcaagtgaaactcctgccccagccccgccaagtgctgggattataggtgtgagccactgtacccagccgaccctgtctcaaaaaacaaccaccaaaaccatgcaagagctgcattctttgttctgtggtgtggacgtgctgggagagtacagaagcaaagtcagctgtccttgtttgtttatttaggatctccatggcaaaactgcacgtcctgcaggtgaaaacagccccaggcctgcgccacacctggaagccacaaagccccacccgcagggtctccaaggtcaagaatgaagggcccagcccaagcgcccttacccatccccaaccccactgggtcccctcctcctgccccagtcgctggcagatttgccctaagcacccaaagcaggaacagccatccaccctgccaggagatgagggcacctgcagcacctccaccccacccggcacatccccttccgcctcccctcagggtgcccgctcaccctgcaggcccttggggaggtccatggtcttgaccagctcctcagcaatgtcgaaggcgttcaggccgctcagcttcttctcccagaagagctgccccagacacatatgtgaacctcaagagtggccctgccctctccccactccaggtccttgctgggctccagggaggcccacctggcctccttgccccatgtgggtcccaatggggcatctcccctcccactgccttgggtctccagaccctgcccaggctttccacagccagggatccagtggacgtttgtaaataagaataaaaaatacacatggggtggctcacgcctgtaatcccagcactttaggaggccgaagtgggtggatcacctgaggtcaggagtttgagaccagcctggtcaacatggtgaaaccccttatctactaaaaatacaaaaaaaagtccggtgtggtgacgggcgcctgtaatcccagctacttgggaggctgaggcaggagaatcacttgaacccaggaagtggaggttgcagtgagctgagaccgcaccattgcactacagcctggacaacaagagcaaaactccatctcaaaaaagaaaaaaaaaaaaaaaaattagccgtgcattgtgacgggtacctgaaatcccagctacttgtgaggctgaggtggaaggatcacttgaacccagttgaaaccaggaggcagaggttgtagtgagttaagatcctgccactgcactccagcctgggtgacagagcgagactctgtcacaaaaaaaaaaaaaaaaaaaagaaaaaacaaaaagaaaatacacacggttctcaggtttttaagaagtaggttacacagtcacatatgggcagtcaaccccctgtatctgtgggttccataaccacacacccaaccagcggcagactgaaaatatttggggggaaaaaaaataaataaatacaacaactggccaggtgagttggctcacacctgtaatccccacagttttggaggccaaggtgggaggatcacttgaggccaggagcctgagaccagcctgggcaacatacagaaaccctgtctcgaaagtgaaaaacttaaaaaaatgaataaaacacacacaaggaacgtcacaagcatccacacctcatgagcaagctagaaaatacctgcaggtaacgtgcaaacattagaccatttccattttttaaaaatatttttattttatttttgagaccgggtctcgctctgtcgcccaggcaggagtgcagtggtgtcatctcggctcactgcaacctccacctcccgggttcaagtgattctcctgcctc[221 bp omitted]cagattttggtatctgggggttgagggtggggcgtatcctggcaccaataccctgcacattccaagaggggaccgcaggactgggtcttgctctgcccccaggctggagtgcagtggtgtgatcatagctcactgcagcctcagcctcctgggctcaagcaatcctcccacctcagcctccccagaagctgggaccacaggcgggcgccaccacgtccagctaattttttacttgttttttgcctcgtcatgttgcccaggctagcctggaactcctgcgctcactacgtccgctccacgtacgacctcattccaaacgtccacccaccaaagtgaacaacccggccgggaaggctggggtcgctgtgcgttgagctcacctggcgcggctggtccaccgccttctgcgggtcgctcttgaccttgttgctggggtggttggtaatcttggtcaccggctgcttgaagatggacgccgtctggcgcacgggcagcgccgtgttcaggtcgggcttgccctgcgggaggaaggatatgcagtccggcctgggggcgccccggcggcgcggagcctcagggggtgcggggcccgggtgaccccctgctttgccggcgcccctcgtgtcccccgcgcccgccaggacccccacggtccggggaggccgctcccgcagggtcggtccggccggctctggaacgcccgccgcgggccgcgtcctcgccatgcgccttgcgctctgcaccctgtggcctgcgccttccgctctgtgccctccgcccgctgtgacctcctgcgctcaggacgccgggctgtgtcgcctgcagctcacgtcatggccgcgtccccgcctagaacgccccgcgccgacgtcacctgcgtgacgccaccactcaccttgacctggttggaggagtcgtagcgcacgcgctggcggctcttgttcatcttgctcatcagcatcttgcccgtgcggaagtcgaaggtgctcaggtccatggagccgcccaggtagcgcgccagctgcggcttgctgcggaacttcttcccgctcgggctgcggggaggcgggacggtcggcgccccgggcggaccccagaccccaaacccaggcctcggccgcagacccaaacccagtcccagccccagcttcaggtcgcgaccccagccccagaccccaacacggccctgaccccaaacccaggcaggccctggccccagccccagaccccaaccctggcgtgaccccagaccttcatcccagaccccagcaccccacaactggcccctagatctgggcgccagccagacccagagcactggccccgatcctcacaccctggccctagccccagcctccacatcggatccttgctccagacccccaaccccggtcccctctgaatcctccccaccgtaggccctggcagcgtcaggcacagcagacgctgagttcgggtacaaacgctactacctacagggctttgggccccggctctgggaggatggctcacatgtccagaacattccagacatggaatttaggtcacattcttgagaaaagaccccacggagaacaggtatgtgagggacagccctaaaagcaatcttcttccaccttggggttacagcagcagggccagactgggaaggggtctcgttctaagatctggggccaggccctaacagctgcttgggcataacccgactggagagctcgcaacaaggcagccaggtaaacacagacctgctctcagacacggggctctgctctcagcctgccatggacaagcgccggcaactcatcctctccaggacataaggacacccaccaatgggttgccctgtgtgtcacatgaggtcacactacaggatgacaagcacccaacccaacacaccgtcatcatggttgggatgtaagatggaacagccatgttggaaaagcctgacagctcttcactgagtttccagatgacccggccacgccactcttaggtatctgcccgaaaaatgagcacgcatccacaccatcacttctacacggatgtccccaggagccagaaggtggaagcagcccagacgccttcaatggatgaacggacaaacgcccatccacacgatgggacatactcagccatgaaaaggagcgaggctctgacacaggccacagcgtggatgcaccttgaggacgccacattcagtgagagacgccagacacaaaaggccacacagtgtgtgatcccatttctaagaaatgtctagaacaggataattcagagacaggaaggggacgcgtagtgccagaggctggggtgcaggatgtggagtggctgctgatagggacaggacttcgtttctctctttccttttggagatagggtctcactcttgcccaggctggaatgcaatggctcaatcacagctcactgcaaccttgaactcctgggctagggtgatccttccaccttagtctcccaagtagctaggacgacaggcacaagccaccacgcctaatttttttttttttgagatggagtctcactctgtcgcccaggctggagtgaagtggctcgatcttggctctctgcaacctccacctcccaggttcaagtgattctcctgcctgagcctcctgagtagctgggagtacaggtgcccgccaccacacctggctgatttttgtatttttagtagagaccaggtttcactgtgttggccaggctggtcacgaactcctgacctcaggtgatctgtccgcctcagcctcccaaagtgctgggattacaggtgtgagtcaccgtgcccggcctaattttttttttttttaagacggagtctcgctctgtcacccaggctagagtgcagtggtgcgatcttggctcactgcaacctccgacttccgggttcacaccattctcctgactcagcctcccgagtagctgggactacagctgcccaccaccacgcccggctaattttttatatttttagtagaggtggggtttcaca[140 bp omitted]acccaggctggtctggaactcctgagctcaagcagtcctcccatcttccctcccaaagctttgggattaaaggtgagtcatcacgccctgctgcttcatttcttttttttttcatttttacttttagatccagggtctccttgtgtcgcccaggctggagtgcagtggtgtgatcacagcacactgcagccttgacctcctggactcaagggattgtcctgccttggcctcctgaggagctaggactacacgtgtgcaccaccatgcccagctaatttttaaattttttgcatagatggggactcgctatgttgcccaggttggtctccaacttacgatctcaagagatcctcctgcctcgacctcccaaagggattataggcggcagccactatgcctggctggtgtcttttatcttgataaaatcatttagaaataatagcacttgtatggtgcttactaggccaggtacctcaaacatattatgtctacaaactcagtcaacagtcacttttattaataatgcatcagcctgagattggtgggtagctctgttttgctgttttcccgttttcccagaatcctctagggcagtctcctcctgtcctcttctgcccctgccccagacgtcctggcccatggcagatgccagatgtcagacaactgagacagctcagaagaatctcccatagccagaaggaaactcaattctgcaggcactgcacagaaatgcttggtcccatgcttagctcaatcgcctctatccaggatctatgtactgggccgatacatagatcacaggaagttttatttctctccacccctgccccccaaccccgggcaaattccatggtccacaaggacacgggcaggctccagcatgtccagtaggacaggacgcctcagggagggcacgaggacaagtgcctgggggtctgaaaccactgagggctcttcccggagatttacttttgagacttaactcttttaattactctctggactggctgacgttcagtcgaagctggtttgcccagggcagtggaaagaaaccaagaaaccagaggctgagactcaggcttcatgtagccacaaggaaggaagaagagaccccacaaaacactcccaacagctctttgcctccggtcaccccaaagagaggccgttctgccttttaagatgaagggaaacaaggccgggcgcggtggctcacgcctgtaatcacagcactttgggaggctgaggtgggtggattgcctgagctcaggagttcgagaccagcctgggcaacatggtgaaacccgtttctactaaaatacaaaaaattggccgggcacagtggcacgtgcctatagtcccagctactcgggaggctgacgcagaattgggttgaacccaggaggcagaggttgcagtgagccgagatcatgacactgcactccagcctgggcgacagagcaagactgtgtctccaaaaaaaaaaaaaaaaaaaaaaggtgtaaggcgaacaagagacacacacagaccacagcctggttgttaagactgggggtgggcgcacaaggcagtggtaaatgggcctggggttctttctagggtgatggaaattctaaaattgaatctgaggatagctgcctatatccgtaaatatgtgaatatgctgaaaaaccattgactcgtgcactttaaatgactgtattgtatggtacataaaactgtatctcgataacaccttctcaaaaagaataaatgcagtggctcacacctgtaatcccagcactttgggaagcaaaggagggccaatcacctgagatcaggagttcgagaccagcctgaccaacatggtgaaaccccatctcgactaaaaatacaaaagtagccgggcgtggtggcacatgcctgtaatcccagctagctgggaggccgaggcaggagaattgcttgaactcaggaggtggaggtcgcagtgagcccagattgcagcattgcactgcaacattgcactctagcctgggcaacaagaacgaaactcggtctcaaaaaaaaaaaaaaaaaaaaaaaagaaggcaggcgcagtggctttcatctgtaatcccagcactttgggaggccaaggagggcagatcacctgaggtcaggagttcaagaccagcctggccaacatggtgaaaccccgtctctattaaaaatataaaaattagctgggggttgtggtgggggcctgtaatcccagctactcaggagtctgaggcaggagaatcgcttgaactcaggaggtggaggctgcagtcagccgagattgcaccactgcattccaccctgggtgacaaagcgggactacttctcaaaataaataaataataatgaacataaaaaattagctgggcatggtggcacatgcctgtagtcccagctatgctggaggcttaggaggcaggatcgcttgagcccaggaggtcaaggaatgcagtgagctgtgactgcaccactgcactccagcctgggtgacagaacaagaccctgtctcacaatgaataaatgaatgaatgaatgcaaatgcaagatagagggggttagtggttaccaggggctgggggagtaacaagtggggagtgactgctaatgaggacagagctgcttttcagggtgatgagaatgttctggaattagatagcggtgatggttgcacaactttgtcaatgtactaaaaaccactgggggccgggtgtggtggctcaggcctgtaatcccagcactttgggaggctgaggtgctggggtcaggagttcgagaccagtctggccaacatggcgaaaccccttctctactaaaaatacaaaaattagccgggcatggtggcagacgcctgtaatcccagctactcgggaggctgaggcagaagaatcgcttgaacccgggaggtggaggttgcagtgggctgggattgcgtcactgcactgtggcctgggccaagagtgaaactccatctccaaaaaaaaaccccactgaattgtacatttctaaaaagtggctttggccaggcagtggctcatgcctgtaatcccagcactttgggaggctgaggcgggttaactgcttgagtccaggaattcgagaccagtctagtctaggcaacacagcaaaaccccatctctataaaaataagccaggtatggtggcacgtgcctgtaattcccactacttgggaggctgagctgagagggtcgcctgagcctgggaggtcaagaatgcgtaagccgtgattgtaccactgcactccagcctgggtgagaccctgtctcaaagaaaaaaaacaaaaaaggtagcttttgtggaatgtgaattatatctcaattttaaataaaggttatgcccatctattgacacaaaatgatgtccctgagattttattcaatgaaaaaagaacagccttgataaaaccacacgtatagaaaaaagtgggcaacatggcctgaactctccccaggcacccccaacagaaaacgcagtctgggagcctgcagcctcagatgaagggctgggttgaggccccagacctgcagagggcggctctgggctgcctggcttcaccctctgcagagaaacctgaaatctctagcctgtagaggagcttctccctgcttttctccactgctagaccctcatgctcagggccagggcccagagtgggaatgagagaggtggggtgatgacagcctcaggatactccgctcaagctggccttggttctagctcccaagctgcagccacctcttagggggttcctgctgcctggacgcctctccctgtcactcaatgtcacgtcctcagagaagccctccctgaccccagtctcattcaggccccgtcatctgccctcccagatttcagcatgtgtcactgcagatctcaggacgtgtacagggttccagctcataagggtacacatttggggaccaagtttcccctctcttgctgtcctccaactttccaggaaccagtccctgagctcctcctgcaggacgaggccccacacattgcttctgatcacagccatcctttccccgctcacttttctcactttatctccccaaaccgggacagtcaagaaccacagaggaccgaagtgcacagtggacggagcggtcgttctgcccctccttggctcgtggaaaccacccgccctcacctgggcggtctcctgcccacgaccccgagctgtgggaaaaagggggaccagccgcacacccccctttacccaggtgctcggcacatggcaggcgtcctccgctttcccctcctgggggacctgaaggcgccacgggacactgaaccaaggggagggcgcaatcaaagctggcccagaatcaaaagcatctttcccgagccaggaaaaaaaaaaaaaagaggacaaacagcaggtggccgactgtctgggacttggctgcagcaggcgactaagtctttgttccacggagggggttccctgcgacctttcagagcagcgccttgttccaatttggggacgggggggtctctgaaagccttccaccaccagtaacatccacgcaaagactaccgttaggtgggctcggaaagtcgaaagcctcaggtctccaccctgagggggccacgacccaagaggaccagaggcctcggaaggagtcaaggggaatacctttaaaaaaagcaacgctgcgtgggagaccagtcaccctgaggcgcttattcccaggactggggcgagcccaagaacccgtattttcacgcacgccctccccgatccgcccatgagccctgctccccgaaatcccggctggccaccccctcgggctccgcgccaccccaggagcgccccaagaaggcaccccctgcgtctcacgggaaccaaagggacagcccaccctccacccctgccccccggtagcatctggccgccgccaggcgcccctggcccagcgcgcacgaacaaaggccgcagtcgccgtccggcagccagtccctgaacggccggccgaaagccatgcggcccaacaagcggcgcacgcgcactgggcctccgcgcgccgggcgcacacgcacgcaagacgcacgcacgcacgcacgacgcacgcgcggggcccaggccgcggcccggggcaggggcgccgaggccgccgcagaggccgctgggaggagcccgttgaggccctgcgcggccggcgcgctcattcacctatagtaaaagacatccctgtggccggccgacagccccgaccttctgggcacttcttccctctcccagccctgcgggagcgccgggcactcccacctcttccgctccattgcgcccggctcctcggcccgccgccgggcccgccgccgccgcccggacccccactcgccgccgccgcctcagctgcctccgctgccgctgccgccgccgccacttgccgcggctgttccggcccgcgggcccccgccctccgcccccagccgggcgcgcgccggctttgccgccctttcggccccctccccgcgctcgccagcccccgctcggggggcccgctccgcccacccgcccgcgcggggccccgcgctgcgcagccgcggcgccatgcccccgcccctctacggccccgccaatcagcgcgctgggagggggcggggccttaagtggcgtgcgcgcctgcgcgctgtgccttgcgagctgccagtgcccagcagctgtgcccggagtccgcgcggctccttttactgtgccctgtctctgccggccgcctggtgcgcgtgcgcggggacatgctttcggactagtggggtcctttcctccgacctttctccagcccaagtcttggggactctggcccagtgactggacctcgacttccccgccctcctggtctcccagcttccgagctttttacgagcgtccaaatctgggggacttcccccgtgaccaccccttccacgcccccaagttccctccagtagcttttttttttttgagacggggtctctgtcacccaggctggagtgcagaggcgcgatcttggctcactgtagcctccgcctcccgggttcaagttgttatgcctcagcctcccaagtagctggttccacggacggctaatttttgtagttttagtagagacgggatttcaccatgttggccaggctggactcgaactccttacttcaggtgatcagcccacttcggcctcccaaagcgctgggattacaggcgtgagccactgcgccccgtccagctgctttttgaaccctcaaaatccaggaatctgagcacccccccccagctccccgaccaccccctgcaccttagtccagccaccatctctggccgggagagttccaggaccttcctgcggaatcgcccaccccctgttgtctccccttaaccccttccccagccagccagagggatcctgaaatggaaacgggtgggctgccccccatcagttccccctgacagcgtcgctcccaaggctagggctgggcgggcctgcacaggtgttcaaggactgagtctagctgctgtgctcccctgcctccagctggagaaactgtcctggttctaaggactcttttgttgacattgggtccacccgatctgggatgctttcccatctgaagatctcgtcccattttcaaagtccctttagctgcaggttccagggagtaggacaggcacattcatttattgattgattgactgactgatggagacagagtcttgctctgttgcccaggctcgagtgcaatggcgtgatctcggctcactgcaacctccacctcccgggttcaagtaattctcctgcctcagcctcccaagtagctgggactacaggcgcccaccaccatgcccggctaatttttttgaatttttagaagagatgggatttgaccttgttggccagctggtttcgaactcctgacctcaagtgatccgcccacctcggcctccctaagtgctggggttccaggtgtgagccacagcggccgacggaacgggcacattttcgggatgttgtgctgaccacagaagcactgaataaatcaggatggatgggtggatgatggtcggatgccccgctcaccccacctcgtcgtgaggtgaggtgaggtgtgagacagccagctctgtctcccgagaagctcaggagctggttactggcctgagaccgaggccccatggcattgggctgccatggaagaatcagtgctcccaaggagacaggaaagtctatgctgtggactcaaagccaggcagttacaccccagaaccagccgtggtacctgactagggcagccagagcaaggcctgcccccatgcaagggagatgataattatgttttgagacagggtttcactttgttgcctaggctggagtgcagtggcgtgatcttggctcactgtaacctcctgagctcaagcaatgtgcctgcctcagcctcccaaagtgctgggatcacaggcgccagccaccacgcccggctgggagattattattatttttttaatttaattatttgtgttttttttgagacggagtttcgctcttgttgctcaggctggagtgcagcggcgcgatctcggctcactgcagcctccgcctcccgagttcaagcgattctcctgcctcagccttccaagtagctgggattacttgactagggcagccagtgcaaggcctgcccccatgcaagggagatgattattatggtggcacccgccaccatgcccggctaattttgtatttttagtggagacggggtttctccatgttggtcaggctggtctcaaactcccgacctcaggtgatccgcctgccttggcctcccagagtcctgggattataggcgtgagccaccgcgcccggccaagattatttttaaaattgggctatgattgtgacaatgcactccagcctgggtggtagagcgagaccttgtctaaaataagtaagtcaataaaatagtctttaaaatggccaattccaggctgggcgcagtggctgcataccagtgtgaatgtattaaagcactgcattgcacacctgaaaatggttaattttatgttatgtgaatttcacctcaataacaaaaaaagtgacccgggacatatcatgtgcacacaggagcccatttggaaggggtcacgatggccaaacagagaggacaacttgagcaacaaaattaaagtttataaaggatttatagtctgtagaaaaaatgtcatcaaggccgggtgtggtggctcatgcctgtaatcccagcactttgggaggccaaggcgggtggatcatgaggtcaggagatagagaccatcctggctaacacggtgaaaccccgtgtctactaaaaaatacaaaaaattagctgggcttggtggcgggcgcctgtagtcccagctactcgggaggc[135 bp omitted]gagtggatgctggtagaaataaatgactgaataaatggctgatgggaccacgagactgctcctctttacagtggagtccagtgactcactgtggcaacaaacacaggaccccatccgccagtctggctcctgtcacctcctgggctggcgagggcctcagtgccaccatgctgaagtctctgccttccctttcgggacttaagtaccaggacagcagatacagaaataggcaggggaagctcactgctactggggtctggtaacctacagattcagggctcaagtcacacaatttcttttttgagacagggtctcactctgccacccagtctggagtgcagtggcacaatcacggctcaccacagcctcaaacttctgggctccagcaatcctctcactgtggcctcccaaagtactgggattacaggtgtgggccactacacttagcctgcagacaatttttttttttaaatttttatatattttttgagacagagtctggctctgtcacccagactggagtgcagtggtgcgtgagccaccacgcacagacccctggccaatgtttttttaaaaatcagaacaaaatctggccgggcacagtggctcccgcctgtaatcccagcactttgggaggctgaggtgggcagatcacctgaggtcatttcaagactagcctggccaacatggcaaaaccccatctctactaaaaatacaaaaattagcagggcgtggtggcaggcacctgtaatcccagctactcgggaggctgaggcagaagaatcgcttgaaccctgaaggcagaggttgcagtgagccaagatcatgccactgcactccaacctgggtgacacagtaagattccatctccaaaaataaataaataaataggcttggtgcagtggctcacagctgttaatcccagcactttgggaggctgaggcaggagaatcgcttgaacccaggaggcggaggttgcagtgagccaagagcgtgccacggcactccagcctgggcgatagagcaagactgtcttttaaaaaagaataagtaaaataaatttctgttggttgagccatgcaaaatctgtggtattttgttatggcagccctagcagactgatataatagctatttccatcaacacacttatgtatgcagacagtatgtctaggatttttttttttttttgagtctcactctgttgcccaagctagagtgcagtggtgcaatgtcggctcagagattggcaagagctggaaaaaactgggcagctgtatcagggagtgtgactttgtaccatattctctttttatacctgttcatttttattttttcattttttttctttttatcagagacaggggcctctttgttgcccaggttagtactgaactcctggttcaagtgatgccccttcctcagcctcccaaagtgttgggattgtaggctgagccaccactcccagcctgttcatttttgtatccctaatgtgacagtttgaaatgtctaccaattctgatattcttcccttcaaaacacagaacctcattctcctccctctgcacgtgggctgggcctggggggcttgcttttgataaacaggctgtggcggaagtgatcacgtgagacttctcagggtggctcatagaagcactgtggcttgctccttcctctcccttggttcacctgctctggggaaggcagaggccatgccgtgaggatgctcaagcagcttcgtgtaggggcccccatgggaaggaactgtggctgtcaccgacagccacgtgagggcactggcttggaagtggctccagccccagttgagccttcctcagacgaagtggccttggctgatgtcttaactgcaacctcatgagagactctgggccacaaccacccagatacatcactcccaaatccccgactgacacagactgtgagagagtgaatgttcgttgctttaagccactacgtgtgggtgacttgttaaggcagcaacggatgaacacactgcagatactacttatgagccatttcaaataggcagtttctgtcagccattggaacactctcctagacttgcaacattctggagctgaaaggacgcctgggtcacctgtgccactccagctacagtcacagtaaccaagccaccagcatgatcaacatccgggcacggagcaggtttcagtgaggtttaatgcaacgtgcattaaaatatccaagctgttttcagaaacataagaagcctgaagctgagctgtgggtttcctcttgtccatcctgaggcttgggctgctccagatgcagcaggtgctgaggtgggaggagctagcaccaccaggcacctggagggagagcagacgaggc[131 bp omitted]accccatctctgctaaaaatacagaattagcctggtgtggtggcagatgcctgtaatcccagctccttgggaggctgaggcaggagaatcgcttgaacccgggaggtggaggttgcagtgcgccaagatcgcgtcattgcgctccagcctgggcaacaagagccaaactctgtctcaaaaaaaaaaaaaaaaattagctgcgtgtagtggtgggcacctgtagtcccagctacttgggaggctgaggcacaagaatcgcttgaacctggaaggcagagggtgcagtgagctgagatcgcgccaccgtattccagtctggcaacagagcgagactccgtctcaaaaaaaaagaaacgtcccttccatatgaagctggctgcggaagtggcccaggacagcagcctggcaggaacaccaatgcagcacaggccccgggctccacgcagtagggagaaacacagaccggagcagggctctgaggcccaggttcaaacagtggcatggcctcaggcctcaggccagcacctggaaaatgggggtgtaagagcacggccacgtgggactgtcatgtgggcactgggaagatgccacaggcactgtggttaagggggcagctggcatgctggagaaacacgtggatgcgtccagggcctcacaggcgcttccaagagctcatggggtgtccagccactgtgggccagcctccaccttccccctctgtctgtaacatgggccccacccagttcaggctgcagtgcccactgagacggaagcaaggtttgcctcaaagactcactgggattgtccagagggagggcgaggcccacaccccaatcacacaacccaaggctgcggggcggacagttctgtgcccgtgggccggagatgccagaaggggcacccagggccccactctcgaatgcaggtctctccagggggagcagtgagggctgccgccccggctctgggagcctggagaacccactcttcggccaccatccggccatcatgcagtccacccaccgcagcccactgaaacttaccagagcagtctgtgaagggtttgtgtaattaattatccttcttaaacttgccattgatgtaaggtacccagtccaggatcagccgccaatcggtggcccacaccagccccacggcgcccacagcgccccatgtgtaggccgtcgggaccctgcgagaggagaggggatggtcaggcctgctctggaccctttctccaagaccctctcctgcccaccccggccccccgtcctgagcggtgatggctgaggtgcgggcctggcacctgtgcccgcccagtgctgtgagccctgagggctggcaccagcagcacaggccctgcccatgctgccggctctcaggaagccagtaactgctcaaggggctgctggggtgggagtggagctggggggaggctgggcctggcgcatgtgtaggtgtttgtaagtttgcaaccaccatgatgatgggtccggtctgctgcagtctgcagaaattcatccatccctgccacagctgcaggactcaggcaggtgccgccatcacagtccctgttcccaggcgaggacaccaaacaacagacagggcgaggccctcacctgaggccacacagctggcgaggatcgaggcctccggttccaagctcatgctcttgcccaccacggcacgtgctgtgagagctcccctgagttgcctgggcccagcagattctaggaaggcccagcagattctaggaaggcccagcagattctaggaaggcccagcaaacccgcctgctggcgtttacgccctcgcacagtatgaacttgggcacaggcttctttttttttttttttttttttttgagacggagtcttgctctgtcaccaagctggagtgcagtggcgtgatctcggctcactgcaatctccacctcccgggttcaagcaattctcctgcctcagcctcccgagtagctgggactacaggcgcccgtcactgcgcctggctaattttttgcatttttagtagagatggg[148 bp omitted]ggcatcactgccgaggtcaagtgacaaaagactggcttcagacatggaggctcacaaggggaatcccagcactttgggaggttgaggcaggaggctcacttgagcctaggagtttgagaccagcctagacaacagagtgagaccccatctctacacaaaattaagaaaaattagccgggtgtggtggcacatgccagtagtctcagctactaggaaagctggggcaggaggatctcttgagcccaggaagcagaggctgtggctacaccaactgccttccagcctcggtaaa[131 bp omitted]gggaaacatggtgaaaccccatctctactaaaaatacaaaaattagccgggcatggtggtgggtgcctgtaatcccagctacttgggaggctgaggcgggagaatggcttgaacccaggaggtggaggttgcagtgagccaagattgcaccattgctctctagcctgggtgacaaagtgagactccgtctcaaaaaaaagaaaaagactggcttccatcctgggcacctttgtgcaacctctagctgcctctggagaagccagctgccatgctgtgagatgccctatgaagggacccatgtgg[136 bp omitted]atggtaaaaccccattctactaaaaatataaaaaattagccaggcaaggtggcgggcgcctgtagtcccagctacttgggaggctgaggcaggagaatggcatgaacccgggaggcggagcttgcagtgagcttagatcatgccattgtactccagcctggtgacagagcgagacaccgtctcaaaaaaaaaaaaaaaaaggaagaaataaatgaatccagccaacaaccccgtgagtgatcgtggaaacggatctgcctggtcacaccctcggatgagactgcagcctcacaagagagcctgaggagttgactcagtgcacccactgaaactgtgagataagcagcatttgctagtttaagcggctaattttgggagaccatttcttatgcacacagcactagataacaattgcaggtcccactgctggccaacagagggctgaaattaaaatccaattccgggcggggtgcggcggttcacacctgtaatcccagcacttccggaggccgaggcgggtggatcacctgaggtcaggaattctagaccagcctggccaacatggtgaaacctcatctctactaaaaatataaaaactagcccggtgtggtggtgcgcacctgtagtcccagctactggggaggctgaggcaggagaatcacttgaactctgtaggtcgaggttgcagtgagccgagatcgtgccactgcactctagcttgggcgacagtgagactctgtctcggaagaaaaaaaaaaatccgattcacctccctggatcacagcaaatcacacagctgggatgttggggcggtagggggtgctcctcctggaggcggatgaagaaaccctgcccacattgccccaaggggcctcaccagagactctccaagtgtaggccaggtgcccgctcaccagctgggggcacgcacagctgctcctggaacctggctcggaggcagatgccaccaacagggcaggaatcttcgcacgtgttgtcttgatggcattctggataagttatttatttatttatttatttattatttattttgagatagaatctcgctctgtcacccaggctggagtgcaatgacgcaatctcagctcacggcaacccccgcctcccaggttcaagtgattctcttgtctcagcctcccatgaagctgggattacaggtgtccactaccgcgcccgactaatttttgtatttttagtagagacagggtttcaccttgttggccaggctcttctcgaactcctgacctcaagggatccacccacctcagcctctcaaggttctgggattacacgcgtgagccactgcgcccagccctgggttattaatcaccagagaagcctgctcataaatatgcccagtgggccggcctccgcctcccctatcatcctggtcaccccatgtaggaccctgtggatttggacagtgtgggaagagcccacaaaacctgatttccactagccactgaggaaggacgtacagaccatgaccacactgaccaacgacctcgtcgccacgacaaccccttcctcaaagcaagccccagcagggcctagaaggggtgtggactgcagggtccccagctggtgaactgtggccctctcagtcctaagtctgagactctgagacacaaccccacagtgcctcctggggatgagacccgctccctagcctcccaaagccactgcctggtggcacagccctgcacggcccctcgcacgcacgtgtctgcaccccttcctctcccgcttcgttattttaggtcagccccacaccacaggtctcgtttctttacctttccttgcccaccaaccagaatgtccgcccacaagggttcggtctattggcgcgtccctaacacatagtaggtgctcaataaatgttgggctgggcgcagtggctcatgcctgtaatcccagaactttgggaggccgaggcaggtggatcacgaggtcagaagatcgtgaccatcctggctaacacggtgaaaccccatctccactaaaaaatacaaaaaaaattagccgggcgtggtggcgggcgcctgtagtcccagctacttatgggaggctgaggcaggagaatggcgtgaacccgggaggcggagcttgcagtgagccgagattgcgccactgcactccagccggggcgacagagcaagactccgtctctaaataaataaatgaataaataaataaataaatgcttgctgttggatgaaagcacggatgacgggtggtccccgctgtgactgaacacagaagaagcagacctgctgcacccgggaggggctgcactggctaccatgggccactgggttctcagctaggagcaggcttcctcatcccaggcctgagttacccacgctgtaaaacgccaccggcaccatcacattccacttgaaggtcccagtcagctccaccgtgcagaccctgtccccgacctgtcccccagtctgggatagaggaagtatgttctggcttccggagacactgccaatcataagcctttgcttttttcttttttagaaacggagtttcgctcttgttgcccaggctggaatgcaatggcacaatctcagctcaccacaacctccacctcccgggtttgagcgattctcctgcctcagcctcccaagtagctgggattacaggcacgcgccaccatacttggctaattttgtattttcagtagagacggggtttctccatgttggtcaggttggtctcaaactcctgacctcgggtgattcgcccgccttggcctcccaaagtgttgggattacaggcgtgagtcactgcgcccagcagctctaaatttttttgtagagataaggtcttgctgtgttgcccaggctggtctcaaattcccaggctcaaacgatcctcccaccttagcctccccagtagctgggactacagacaggtgccaccatgccctgataattttttgttttgtagagatggggtttcattgtgttgtccaggatggtcttgaactcccaggctcaagtgattctcctgcctgggcctcccaaagcactgggatcacaggccggagccactgcacccggctaagaccttgctgctttttttttcttttctctttttgggacacagtctcattctgtcacccaggctggagtgcaatggcgcaatctcagctcactgcaacctcctcctcccgggttcaagcgattctccttcctcagcctcccgagtagctgggattagaggcacccgccaccacgcctggctaatttttgcatttttagtagagacgcgggtttcaccacgttggccaggctggtctcgaactcctgacctcaggtgatccacctgcctcggcctcacaaagcgctgggatcacaggcgggagccaccgcacccagccaggccttgcttcttagcaccccacgtggaaacaccagacaaccctacggaggccacccccagcccggcttctatgggggccacccctatgccgtcccgctgcccacgtgggctcaggcgcagctgaagctttcacgctccttgttaaaaatcataaaaaccaaaatagtggcaaaggccgaagatgccgcgagtgctgggctggggatcgggactcggcaccttctgggcgcttccgtccagggggtcaccattcggatcccccggtagagatggggaaactgaggcttggagcggcctagccgcggagccgggcatgctggggtttggccttgggtccgtcacgtcccgttcacgccgggacgcgccgctccgcctctcggcctcagtttccccctctgtcaccgggaacaacaagggacctgggcccggcccggcccggcccccggaaacgcgcacaaatacggaacgcagcggcgcggggctgggccgaggcgggagcgcggatggggccgcgggtcggcgtcctcaccagttcttgaccagctcccggtagcgtgggcccaggaaccgggtcaccatcgcggcggagtcgcaccctcaggatgaccctgtccagctgacccggctacactgcgcaggcgcggccgcggcgcgcacgcgcgcggggagggcggggggggggggaggaaaaaaaaacatcatccgccactgtgcgcgcagacccggaagccacttacagtaacttccggcgagggttggacgaccgcggagaagtggtccggagtgggcggcgttagggcggtgctttctggccacgtggtctggcggccgattgtgcttctgggctccgcggggctacctgccagtgattttgtgcgcctagtatgtgccagaacgttatttacaatgaaggaaactgaggtccagcggggaagggtcttgctcagagtcacacagaggggaagagctgggattggagcccacttttggaggcgtcaggcgttgttcctgattcgctgtaggactttggtcgagcggcagtgcttccctgagcctcagcgttgcccgttgcttggaggccctgtcggaaatctctttgcaggattccgtttgcgagcctgggttattcctcattccggcagcagagggtggcctggctccttgctcggtgaacgtctctggatgctcttagctgatgacaggcaggtctttctgcctcctgctttccaccgcaccaggctcgcttgggctcgcctttctccagtccctgcttcctctgctctcccacaacccggcgcagcaccgtacatgctcactcagctcccagcttccagcctcccccctgcacaccgggccggtgtgggcagaaggaagaggggcatattcccagacaccgccattgcacttttgtgccttttcccccatattcaagagttgcctccctcaggaagccctcctggactgcctgacccacaggcacctttacagcatgaacggaaaggccatagcctagacggggcactgggcgtgatttgtctctcgggcgccagcgtcacttgcaggcctcgtgataaggaatggacaccgtgggttcttctgcccagcctggcctgtcctcctggggtcagcccctcagtacaccccaagcctgcagctctctggggactgcgggtgctaacccatccctatccctggttaaggactcagggtgggagccggaaataggttttggacaccacagtctgggcactgtttttctttctttttttttttgagacggagtctcgctctgtggcccaggctggagtgcaatgacacgatctcggctcactgcaacctccgcttcccgggttcaagcttctcctgcctcagcctcccaagtagctgggactacaggcgtgagccaccacacctggctagtttttgtatttttagtagagatggggtttggccatgttggccaggcttgtcttgaattcctgacctcaagtgatccgcctcccaaaatgctgggattacaggtgtaagccaccgggcccggccctgggcattgtttgtagaactttccagttggcttggggtttttgagcttgggatcagagagcacctgaataagactcttcccattggtggaaacttaaaaaagtgggatgcaggggctgacacagagactattaagagaaaggacaggaacacaagggctgctggaatgtcagcccagagtttccagatgccacaatgtaagagttcaccagtggccgggcacggtggctcacgcctataatcccagcactttgggaggttgaggcgggcagatcacctgagactgggagttcgagaccagcgtgaccaacatggagaaaccccatctctactaaaaatacaaaattaaccggacatggtgacggatgcctgtaattccagctactcgggaggctgaggcaggaaaattgcttgaaaacccgggaggcagaggttgcggtgagccgagatcacgccattgcactgcagcctgggcaacaagagtgaaactccgtctcaaaacaaacagacaaaaaaaagagttcatcagagacagtgacataaacaagagctgagagatggagagagatttgtaatgacacctggatccagctgtgcctgaagccattcaacatgacatagaacttcctttttgtttcttgagccggtttttgttattttgttggaccatctggatgtcccctccaccctttttttttgaaacggagtcttgctgtcgcccaggctgcaggctggagtgtagtggtatgatcttggctcactgcaagc[207 bp omitted]cctggcccaccctttttttttgacaggttctggctctgttgcccaggctggagtgcagtggtgcaatcacagttcactgccacctcaagcgatcctcccacctgaacctcctaagtagctgggactacaagtgtgtgtcaccaggtacaaccaatttaattttgattttttgagacagtctcgctctgtcgcccaggctagagtgcagtggtgcaatctcagctcactgcaatccctgcctcctgggttcaagctattctcctgcctcagcctcccaaatagctgggattacaggcttgcgccaccatgcccggctaatttttgtatttttagtagagatgggatttcgccatgttggccaggccggtctcgaactcctgacctcaagtgatccacccgccacagcctcccaaagtgctgggatgacaggcgttagccaccgcgcccggccaatgtatattttaaaagttgttttccagcatgaatttagaggccagctgggtagagtggtggacagggctccctcagcaccttctgtcaactcctggccactctctttcccttaaaaattatagacatggggtctcactatgttgcccaggctggactggaactcctggcctcaggcgatcctcccgcctcagccacctgaagtgctgggattacagatatgagtcactgtgctgagccttctcctccctaaggcacttgtgtgccaaagggctctctcctgggggccaccccccgtcaagtggccaggaaggcactccttccaccccaaccctgtaggggagcagggcagtccagctgtgtcctcgcagagatgcagcggccaagtccctgggcacagcagcagatgcctgccagtgggcactttgggatgagcagcgcccccacaggtcctgccacaccccttccccccgagagctctgtccgtgggttccgtgggcatccggttgtggaggaagtcacagatgccgcactaaggagtgtggggttgacgctgccagcaacggagccgtggaaggtttcagaggagcagtgacagactcagacttcgagccgacttcggagcaggaaggggcagggaagtgggttccaacagcccgggggggggacgttgggagatggggagccctcccagatgggggctgggaggaccgcaggtcctggatggttcctacgcgcccaagtgcagcccccagggagctgcttttccccgggagccaatcctgcttccaggtggcctggagccctgagtacacatgcaggttcccagccgccctgggagccatgggctcctcagagtgaggagtcgcttcgaggaagcccagtgcacagggtggaccacggtccttgctgcacccgaggtgaacgtcagggcccccccccacttcccttcctaaacatgtgacaccagaaagaacccggggactgcagggcatcgttataaaatgtcacgtttattgctacagtgctgttatatacaggacaggtctctgaatccacctgaaagagggtcgttttaaagtcccaatcatccagccagctgtgttgacacgtatacaattattttctttaaaaaaatttttttgaaaaccatcttgaggcactcagatcacaccccccaccccccataattgtggttcccaggaactgctgtttcttcctcctcgcgctgggtgaatctcgtttgaattctatgcagaacgcacagttccagaggctatggggccactgcccacccagacctaggggcagggccaggagcaaaacaagagggagaggcaagttcccttaagagatcaaactcccagggcgtaggggaagccaccgagaagggagaggcagccggacagcccctcccctccgcctggcctggactgggggcagataccaggcattgagctggccttgaggtttcccttgcatctaccatggggcccaggctcccaagccagtctggggaggggagtcaggcagtccaggatctcctgggggtaacggtgggagtctcaggagtggcacggggggagacgcccgacctgcagcggggatgaacacagccagcccaggggtccacaaggcctcaatgcagggaggggcatgaagggcacatgaaggcccccagctagccaggcccacacctgggtgccacagtgaccactgccctagttcgtgtggaactggatgggatcccagggtaggagacttgcagttttaaacccaagacagtccccagccagctgggaagagctggttaccctcatggcaaaagaccagaaaaggagacctggagagaggcctgggtgctgggacatgggacacagatgggcccgaggggacaccctgctggttctgcagcagggtcggacgcacagcccaaggccttcgtggggctcagaccagcacagtcccccggctccagccactcttgcccttggaccacacagagggagggcagcaggtgtggccccaggcccagggatgctccccagcattgggggaggctggccaggcccctggcatcctgtctacgtcacgatggccctctggtgtaatggggacatggtggggtggggtggggggtgtcctgtgctggctcctgagcagcatcctctcagccagagttcagagcatgagcctgggtccctggggcaaaggagtgaaggacagggtgtccaggaggtccccagcaccgggctccagggtgtggtccccatgccaggggtcactggtcccaacaaaatgccccatttcagagagctgtgcaggttccaagggagagcagcttaggggggcctggggagggcgttgtgtagggtagccctgggggccacagctgcttggcagagtcacctgggagggtcagagccaccttgctgacgtcccttcccccaagcccaggtcagtccccttcctgaggggagaggatgcggcagggaagccccaaggtgccttcatcagggaacgcccacgcatcactttccacatgacaaaaccaagagaacccccaacatcaaaaaaacaaaagacccgccgcctgtccccgttctgtctgtgtgcagtggcttccggggggggggggggacgggggggctcaggtttacacggggtctttttaatacaacgtttaatcatctggttgatcaagaaatgcaatgctcagtctaggaacagcagcagaaatagcgagagacacgggacttttatacaaaaaaatttgttgcttacaaaacatatgcaaaaaaagcttaaaaaaaccagagaccaaaggcagcatccttgctaattttcatctacattaagaaaaaaaaaatcttgtaactaatgtttttattttccttaaaaaaaatatttcgcttaggcacaatttgctggtggctttagaagaataagccaggtttccacagcatcccccttgagtgatatgtttccatttctccgctttttatagttaaggcatttttttcttctctgacaaagtgtatgttttgttgcttgctttcaggttttgtttactggaaaaaaaaaaaatgctcctgtcagcccaggcaacagggccaagatgcagtttcaggatccatgggacaggtcacagagtgacacggtggctgagattcggggacagggggagcgaggccagtgagtggtaggccagggccccagggagctcctggacccagtgtcaccttggccgcccccatcactccgaaccttgtcaggttggtgttggctcgatgctgacaacaggtgtgtgaggtgtggatgtggatgaagcccggggtctcgagtggccgttctggggccagagcacagggctgaaagcgggtggctcgtcccacggaggcatacctttcacatgtgcccggcggggttgtgggcttcgctcaggcctgggtggggagctgaaagcaccatctgggggtctccaaccacacctgacaccttttcctcttctcgccgtttcaaacaggctgctttgggattcaggttccgctctggagggaggggggagagctctgtgggagacggtcccagggaggagaaagatgtgaggtgggagtggggggtaggatgtcgggggggggggtgggggcagagccccatcacgtgtggcctcctgtatttccggctctcacctccttccttgagaaggctggggggatggggtggaggcttgtaaagaagagagtgggtatcagggggtgtctggggaacatcactgggtctgagtccagccacaaagacagacatggacagagtccgggggcggcaagcacaggaggaccccagcatctgcacctgggtgtggggaagggagagggtgctggggcagccctggccggggagcctacctcgcacctgctgctccagccccaggatgacctgcacggcctgctgcaggatgagcagcttggtctgcgctttgtccgacttgaggtgcatctggcacatgcgccccagctcccggaaggcctcgttaatatcccgcacgcgcacccgctcccgcgcgttattggccatgcgcctctcccggtccctcaggtctttctcctccagggacagcacctcgtccgtactgctgggtcacagcaccgaggcctctgttagtgatgcgccaaggctgggtgggagggcagggctgggttgtggagagggtatccagctacttgtgtttgtgctggtgtgggcagcagtgtgggtacacggctggtgttggtgggcacagcagtgtgggcagcagtgcaggtacatggcttacattggtgggcacagcagtgtgggtacacggctggtgttggtgtgggcagcagtgcaggtacacggctggtgttggtgtgggcagcagtgcgggtacacggctggtgtgggtgtgggcagcagtgcgggtacacggcttacgttggtggacacagcagtgtgggtacacggctggtgttggtgtgggcagcagtgcagttacacagctggtgtcaggcactgcagtgcaggtacacggctggtgtcgggcacagcaatgcaggtacatggctggtgtgggtgtggacagcagtgggggtacacggctggtgtgggcagcagtgcgggtacacagcttacgttgctgggcacagcaatgtgggtacatggctggtgctgctgtgggcagcagtgcagttacacagctggtgtcaggcactgcagtgtaggtacacggctggtgtcgggcacagcaatgcaggtacatggctggtgtgggtgtggacagcagtgggggtacacggctggtgttggtgtgggcagcagtacgggtccacatgctgatgtgtgtgttgtcacatgcgtgaaaatgtgcttctctgtgcacgcggcgaatgtgctccctggaatgcagcagagccccatggtggggcgcctgtgtgtgtacgcgactggctgcccaggtgcaagtgccctcagactcagctctaggggaggctgtggatgtggtcacacccaggaagacccaaggtctgactgttcccagacgtttctgtggagggagatggggccctgcttccccgtctgggagcccacagggtaactgcttctcccttgaccctgctcactctgtgggccccagggcagggctgggggcaggggaggcccagtgcctgctcctctctttgttcttccctcccaagatgatgactttccctgctcagagcagccacttgcggggtgatggacagctaggcctggccagactcactgtggacagaggaggccttgaagacacgggctcagcaggcaaatacctgggccactccaaaaacccgggactggggagtccaggactcaaatcagggctcacatggagcaaaccagctcccatcccccgagacccccacaccctggggaggagcctcagaaatgcacccgtcccctacagtgaactccggctgccccaagatgagccctccctgagctcctgcccctggctgggaaggccagctccctaggcctccaggaaccccattgtcactgccaccgtgaatggtcgcagtaggagctctgaggttccaagagcctgttctgtgccaggcccaaggctgagccccctctccagccgagcagcatgcagctggcgagcgggcactgttgctgctgccgcaggggtgcgggtcccggcccaggcctctgtgctgcatggccctgcatgggtgacctcgctctgttccctggcttcctacttggtagaatggatgccggtccccatcagggcacccactgctctaggttgtggtgaagatgaaatgggtgaaggtctggcccagtgcccagcatgcctggtgccctgtcttagtctctagggggctgcctcacccacttgcctgcccaccctgccttaggggcctgaggggatccctccaggtggtgggggcggcccctggagcccaggacaagcgcacagaccaaactgacaggaccaggggctgcgtgctcccgggtctggtttcttcccgcaagccctgacggggggctttgggggaggaaacgccctgaggttgcagcccagccgctcccggtgctcgggcagcaagtgcgaggtgaggaggggctgccacgggaagcagagggacggacgggcgggatggaggggagggcggaaggcagacagcagagaggcgggcttggggggcgcgaggcgtgccacacacggctgcagagactcggaaaccttagagctgaggggatagcgtgtgggccgggccggggctctggctccggtcccagcaacagtgctgcaggagagaaagggttaacggggtgcaggcgaggaaaggaaggagttaaggaagcagccgccagcgccagcggggggaaggagtcagctcacatctgcgggtggggacagggtctgtctgtatccttcctccccctggccctgggaaatgggggtgataggaagtttccctatcaccttcagatagggaaactgagtcagagacaggggatgggctcatgtggccttgcgtggcatctgcctgacgggaaggggccagggtggtttgcacaccagctcctgtctctgggatcgggggacactggcctctgtgagctgggttctgggcttcccaagaaaggaggaccacggcgagtgggagccccgtggagctgggagatacagttctgagccacagagcccaggcctgaaggactaggggtccagaaagagtccagtcctcccactgtggaggggatgctgaggcaggcagggagaagggctggcagtcaggagtggacagtcatggcaatgcggtcagaggggtgaagggcacagtcactgcaaggaggcaactgctgcagagggagggctggctccaggaaggcgggcggggaaggagaacgagggcaggaacacgagggagggtggcgctgcagggacgctggtggcccgcgcccccactgacctcgcacttgctgctccaagttcaggatgaccgagacagcctggtgcaggatgagcagtttggtctggggcttctcgctgttgaggtgcagttggcacatgcgccccagctccttaaaggcctcgttgatgtcacggacccgcagccgctcccgggcgttattggccacccggcgctccttctcccgctcggccttctgctctggggggagaaggtcgtcctcgtcctcgtctgggctatggggagggcgccgggagggggccagagggagacagtgaggttgggggaagagcgtggggcccgccgacggcctcccagtgtgggtgcggtgtgcgtgtggcctgtgcacatgtgcgtcctgatggggtgagggtggggagtgccgaggggtgggttggcacctggtccgggcccggggggccttcagctccttcttctcctcctccgagtggtcagccgctgacgtgttctcctcgtcctccttctcctcccgcttgatctcgctggcggccgccgtggcacctgctcgccctagccctgcaacaggcctagggtcaggggcctgcgtcggcctccagggccaactgacatatctctttgtgctcctgtggtgagggacttgggctttcctggaaaaaccaggtcttggccaaaaataaaaacaaaaaaccaacaaccagaactggatccctacctcacgccatgtgtagctaccaatgccagacagattaaggaccacaagatgaaagggaaacagttttaccacctttggaacaaagtgtgtagaaattctgcagcaactcaatggcaggaatctactaagatgctaaaagaacactcttcttttttggtgaaagtaaactgtttcaatcattaacttaaaaatatggaacacttcggatgggcacagtggctcacaccagctcacacctgtaatgccagcattttgggaggccgaggtgggtggatcacgaggtcaggagatcaagaccatcctggctaacatggtgaaaccccatctctactaaaaatacaaaaaattagccagctgtggtggtgggtacctgtaatcccagctacttgggaggctgaggcaggagaatcacttgaacccaggaggcggaggttgcagtgagccaagattgcgccactgtactccagcctgggtgacaaagcaagactccgtctcaaaaaaaaaaaaaagaataaaactttggaacacttcaggaatgtccacgtcacccttgtgcagatgctatgctaatctttatcattctcattttagtccaagagctgtccaagcaagtgctcaaagcgctgcttttgaaagaacacaggccgggcacagtggctgactcacgcctgtgatcccagcactttgggaggctgaggtggaagggtcacttgaggccagggggtcatggctaccgtgagctgtgatcatgcccctgcactctggtgtgacagggtgagaccctgtctcaaaacaaaacaagtaaaaaagaaaaaacaaaaatcagtaagctggactatatcagaattgagagttcctgatcagcaaagataccaggaaaagaaaagcatttgccaaagaatagaagacacccaccacagatgtagccaaccaggaggtgatctcccacaatcaatgggaaaggacaaaaagaaagtaactcagtagaaaaataagcaaggtatccaaaaaggcatctcacagacaaggaaaccacatggctagaaacacgtggaagtccgcttcagcacatcaagagattaaggaaatgcaaattagggtggctttgcgctaccctttcatacccagtcagctagcaaagttgagggacctgaacagtcaaaatcttgcctgtgggagggcaacttggctgctttggaaaataattcatcagcctttcctctgaattgacaacaggtgtatcacacccttgatcagcaggttggcaggaaagcgtgatgttggaatgacctacagccccacgcccgggccagggccaacggcacactcacaatgggaccccagccgctcacaccacacatgtaccccacacacaacataagccagcaaaccagcgtgtaaagaacacgctagtgggacgccgtgttcatgaagctcaagaacaataattgcaaaacatgtggcttaagggtacacagtgccccaaatgaatgcggccactctgcattcagcagggcctgggccacccccaaaacccgggcttggggagtccaggaatcagtcagggctcacatggagcaaaccagctgccatcccctgagacccccgtaccctgagggggagcctcagaaatgcacccgctccccacagtgaactctgctccaatcggccaacgccagccaccaggaccagcccaggcctcagcacacgaagtgaaggacaggaaggaaacagaggggagcctatgggtgaaagactaagcttggggctgcccctggaaactgctgacctgtgggtccggacccttctctggggtggggccgtcctgggcactgcagggtgctgagcagcatccctggcccccacccactccatgccaggagctcccctcagccctgacaactgtagatgtccccagacatcacccagtgtcccctgggggcagagccgctgcggtgagatgccctggcctaggagtgatagaatcaaggtacttggaaagtctgcctggaaagcaggcaggattcctgggctggtggaaggcacagggccaggacagcgcccacaatgaccccaccttctcctgggcctctcatgggtgtctgagacactcaacaatccccaggcccaggtccagatttgtccccaaccttttcctttgtccccttccttacggagttcccagccccagtgtcacccacagctcgggccagaaatcccagagccaccctgccttctctcaccctcaagtcctgtccatcacaaatcctgtgggccccgccttcaggagatgcagggcccacccactgctcacccctccaaggcccctggaccagccctgtggcctctgccttggtctcccggtgccactcatagtctgtcctccaagcagccaccagagggtatctgtgagcacctgggtcaggtcccatccctcctcagccctccacggctgccacctttctcatggccaaatcccaagtcctccccgcagcccacaaggccccgcatgacctgccctgccccgccctccccccttccctctctccctctcctcactctgctccaaccccacgggtctcctggctgttcctcccaggtgcagtccagccccagggcctttgcctgggctgcgccctctgcctgaaaccctcctcctccaggtacttgcctactcttgcctcctcccagatgctgcccaaacaccaccttgtggcctcatgggccaccatcttcaaagccatacaaaacccccaacccaccgcagccacttcgttccttctccctggcacctgtactgtgcagcgagctcctggtctgtctcccctgaggcagaggcatcctgctgcacccctcgccccttccccagtgctgagcgctgccaggcacacagcgtctgggagcaggcgaatgaagaggcagcccagagctgtccacctcacacgcccagggccaacgccggccccgccggtcttacccaccctcctgaagttgctgactggggcgcccatgtcaccaggtgcccccacggtgacacctgccctgggctcccaccctgacccccaccactagagtgcctcagtttccccaactggaaccaggagtcggacagtcccaagctcaagggcttaccactgtaggagtcgggaggccgagacaggtcagggagggtgcctggctggctggggagggccgcgtggttgtgcatgaggctggtgctgcctgcgaggccgtcctcggggtggctgcctccaacctgcaggcgtggggagacgggtgcatcagggggagccgggtccccgcccactgcccagctccaccctcgcccagcgctcaccaggcctgcgtgccgcccgcccagtgacatggggccggtgaaacctgaggccagcgccccgtggccaggcagcagcgtgtgcatgtcgccggctgtgcccacggcgtggctgcggagcacgtggatggcctcgtccaggtggtcttctatcttactctgctgcagggtggggggatgggtggtgaggggcccaagccgagggaccccacaggcctccattcatgtcccttccgcatgcaagtggccggtggtcccatcttccccttccccaggaagctgcatatgccaggcatctggcgcccgggagcacacacaaaatgtgtgtgccttggcggccacgaggcctcaataacagcttggggcttatttacaagaaactaacaaaaaggtttctccttctcaaggagcgtctgtcctgcaaattctgtcggggaagggtggggtggggcggggcaggcactcaccaggccgtggagacccccgtcgtagctgggcgataaggcaccgggggctcctgctcgaggccactgtgacgttcctggaagggagtggggacgtgaatggggtgcgaggggcggggtgtgagcatggcctgatgcccatggggagggattcatgaaccaccccgcctgtccagcctccggtgatgcccaagatggccattccggggcaccccacactgatgcaaagctgctcggccccgccaggcagggatgctgggtgcccagtgggtactgccattcctatctctgagcctcagtttccccatctacaaaatccaactccccactcagaggataaagtggctcggcagcacacagtagggggctcctccccatgctgccccaccctggctgacccacgctgggctccagcagcaggcaagaaagtggcaagctccaggtgggaccagacaggccgaggtgaagtgagggttcctggcgcttcccatgggggcagagatgaggactcacgggtgtttttaaacacccagaccttctggaaacctccagttctcactccccctcctcctgtacctgcccccgaccccctgcggataagcaagcacgtcctcacagggataggagggtctgccctcccatgccggagcaccgcacagggtaaacagtcagtacctaataaatacccagtgggtgagcaaatggcaacacgcacacattctagagtccaggccacagccctggcgatgctggccccatcggacctgggagctgctaggcacgccaatgtcccctcatgttcacgcagtgtgaactgccaggtcctgcctcctggctttgcctgtgctgtgacctaacctggacgccacctcccagccctccctcactgcctggttatgtgctatagccttggagggctggcttggaggctgcctccactaggcagctttcctggattgcccagtggaacacaagcccatgggggactcccttccaccgtcggttcctgaccagcgatgccacgggcccttgggggccatctgctccctccccgctgcctgcctatcccagcaaggtgcagacaccagaaccagcctcccctcccccgcaaagccttcacagacctcagcctcccctccccccaaaccctcacagacctcagcctcccctccccccaaaaccctcacagacctgccaggccctggggggagcccacgggggtagaagggctggacgagaagttattgcttgagtgatccggggagtagatctgcgaggaggaccaggagagatgggcggtcaggggccggcctctcaggtcacttgcctggccaccccccatgccccacgcctcaccgaggccagtgctttgccgagggcatccccggagctgccagctgtggtccctcgggagcctgtgggtgaagagaggtgaggcccacgcagcccggcctgggtgctgccgccgacggcaagctctcctgcgttctgccgtcctgcacagacactgctgcgccagggagagcagcctgactcgggtccggtttctgtctgaccccctgaaaccagcctctgcaggggttgaggcactggggacaggccactggcaggggaccctgggtgggtgagtccccttctgggcctgggtgggtgagtccccctctgggcctggatgggtgagtccctctctgggcctgggtaactgagtccctctctgggcctgggtgggtgagtccctctctgggcctgggtgggtgagtccctctctgaccctgggtgggtgagtccctctctgaccctgggtgggtgagtccctctctgagcctctttcccagctgtaaggcgggaaagccgctcctcaaagatctgtttccagacatcccaagcccaacgcacgtggcaggccctgcagacagcggacaatgagaactgacaacaacccgctctcagggccagcagacgcgcctgcgcctcccgtggagtcctcgccaccccccacccagaccctgcctggagcccagtgtcccctcggagaggccgcatcccagggaggggccatacccaggaggctgtcggccccgctgacaggcggcgtgtggctggagacgccgccgtacgtggctccgggggctgaggagaaggaggatgcagatgggagcccaccgttcacctctgctccatgcagctggtagccctggggggtcaggcaggaggagggtgggttagatgggcactgccaccctccgcccaccccctgccccctgccctgggtcctaccatacgctcgtgctggtgcaggccaccaaacgtgctgctgcttccactgctgcccaccgggccgctaccgggcgggaggggcagcggggatgagcccccacccagcatgggcccgaagcccgcctggcccgggggactccagagctcggctgaggggtgcaggctgccatctgtggaggggagctggtaaggtgggggccgagtggggaaccccagccctgccctaccgtccctggcgagcccccgccctgccatgtacctgccacgtagaagggggcgggataggtgctgctgggggtcttggcggacgggtaggcggtggcatccctgccgtagtcctcacctgagctgggtgggtacacctgcgggcgggtgggcggtggggggtgcagtcaggacggagggaccacgatcagcccatgcaccttgccggcctcctgtcccctcctggtagcacatctaccaccccgtttcccttccctgtaaagccacccccctttaggtaaatcccagcccctggccaagtttgaggttcttatgatgtcctggtctctctctcctactccttttccagcccccacctcccgcctccctgaacttctgacctttgtacttgaggacttggatctggctctgcctactaaacctttttcctccttaatccagaaaactcctatcgacccatcaaaaccccagctccaacaccccatcccatccttctcccttgttccccagctggaatcaatcttccagtgctgagcttcccttggtcccagagcaacattcgtccttcactaaagtaacaggaagaggggtctgtgagtagcgccagctctgactggttggcactgcctggactgtggggctggggcctgttggtaacgtctgctgctgtgctggagcgggaagtatgctgggtgggcctgatgttgtaataaactggggggcggtttcagggcagagaaagtgcaccctggggaaggaggggagtgagtgatactgttgggagcagagcctgaccacgcctttggcctgggaagtcaacctgactctaaccccgaacccaggcctgtggggagctggtcggctggaggggtgaggagatgtatgcccagggctcttggggccagcacaggcactgggcagagggtggttggtggctactgagccagggaatcggcaaattccctctccctccagcgagatgagaccgcaggagtgtggcacagcagcctggaccatctgcgaggcctggtagggaggcagggatgcggggcag[132 bp omitted]cctccgcctcctgggttcaaacgattcttctgcctcagcctcccaagtagctgggattacaggcacgcaccaccacgcccggctgatttttgtatttttagtagagatggggtttcaccatgttgactaggctgatctagaactcctgacctcaggtgatccacccacctcggcctcccaaagcgctgggatgacaggcatgagccaccacacccagcacaattgtgccctttctaaaggggcctcagccaccaggactgcctttctctcaaaacaagacagacagaggctggacctagggaaggacttccccgccttcccttggaggcggcctcgggtcagagctcagatcttggctcagaaatcacagggggcctgtccactcagggcccaccccgccatgtgtgttcccaagcttcgccaggacacagggcctggcactgccactgacgagctgtggggtcccttctccctcgtgcgactcaccgaggatggaagacccggcgggaccttccggaccttcttgggctgcgtgtctgttagaagcaaaaggggtgagaaccggccaccggccatgagaacaacccctgccctacaccctggaggagagaccctcacaattcccgtttcatatattaaaaacctcgggtcggctgggtgcggtgcctcatgcctgtaataccaggactttgggaggccaaggcaggcagatcacgaggtcaagagatcaagaccatcctggccaacacagtgaaaccccgtctctactgaaaatacaaaaagtagccgggcgtggtggcgggtgcctataattccagctactcgggaggccgaggcaggagaatcacttgaacccgggaggcagaggctgcagtgagccgagatcgtgtcactgcactccagcctggggacagagaaagactccgtctcaaaacacaacagcagcagcagcaacaacaacaaaaagccccgggtctatttatacggctccaaagatgtcgaagaaccacgatggttttctcccgcgacgcgcagtttggaaaacgaggagttggtggattctaagccaaggctctgctgagaagccccttggccccaccctccttccaagatggccccgactatcccacgcagtcaggcttcaccactaggggctgctgtttgcaaactcgcctacaggataaaatccgtaacccggaaaccagcactcaggcgccttcctgatcactcacggacgtgcgcacagtgggaaaagttcgagtggcccaggcgcatgtgcccagccaaggcggaacagaggcctcctcccgcatcatggggctcctgtccttggtctattcagagccacgatcttttacgtttttgtgctttttgtgggtgatttcacgcttatttttttcaggcagggtcttgcgctgttgctcaggctggagtacaatggtgcgatcgcagctcattgcagcctcgaactcccagggtcaaaccatcctcctgcctcagcctcctgagtagctgggaccacaggtgtgtgccaccatacttagctaatttttaaaatttttcgcaaagatgggatctccctatgttgcccagaatggtttgcaacttttggcctcaagtgatcctcctgtctcggcctccagagaagctgggaccccaggtgagtgccgccatgcctggcgactgtgctgcctggaatgggccccgggtagttcaaggcgccgtccagtgctcctgagcccgaggctgtgacgtgcctcgcgggggatgcccgcgtgtgcagcagggctcagtgcagaggagccacgatgcagccccatgaggcatctgacacagaaagcacatggcagagcccgtgcccgtcagctgcaggaacctcgggaccagaggctcgtaggaacctctccctggacgtgccacgcccgccggcccctgcctcgaccccccgtcaccgtccatccctcccacggcccgagcgcccgacgtccagccaggacctggaaggtgcggggtctgctccctctggtgccctcagctaacgggaagcctcctacctccctttgcaggctccctcccagaagcccccgatgccccggccagaccccgctcacctaggctgccgtctgccgctctccgccgggagctgccggagtaggaggggtagtactgggaggtccccttcatgcccgaaggggacaggggcccggggctgttgagggccagctcgcctgacaggaagccagcctggtggggagcggatggtcagaaagcgcccagctggcatccagaccccaggctgttccattcaagaaaaaactgcaaaggccgaagccactcagacccgccctgcagtgggtgatgccccttctgcctgtcacggtgtttctctgtgacacctgctgtgtttttctgacttgagactgaccgcatcccacactgctgttttcacgaagaacgaaagactgagaaacagataccagtgtggccaacccaaggggctgctcccccgattctgagacgcaaagtacaaagctgcgtggctaagcgtctgtgcacccggctgcttcctatctttttggttttgttttgtaaagccctcggttggattctgtacatgttagtgtgaaacgggctttcttcctggggagccagggctgccctgagccgggtcccggaactgactcctgcatttcatccgttctaaggccgggcacggtggctcacacctattatcccagtactttgggaggctgaggcgggcggatcacctgaggtcgggagttcaagaccagcctgaccaacatggagaaactccgtctctacaaagaatacaaaattagccgggtatggtggcacatgcctgtaatcccagctactcaaaaggctgaggcaggagaatcgcttgaacccaggagacagaggttgcggtgagccaagattgcgccattgaactccagcctgggccatgagcgaaactccgtctcaaaaaaaaaaaaaagaatcatctgttctatcatcatccagtggccccacggggtggcccagcgcccaggacagggccttctcccgaggcccggcctgtcctgagcccgcaccctgtgtggccaccgcggggctcgatgagtcacccgggagcgccagagagcagggcccgagccctagttctgcttctcggatggggagcccgggcacttgcgtattcctgtctgtaaaatgggcacgtaggccgcggcccctcgttgcggggactgatagggaaacgcgcatctgcccctggcgcagagcctggcacccggctggccccctccatcactatggctactgttgctctggcttgggcacagtgagcacacagacggccccacctgtgacaaggccgagccccaccgagagctaggagctgacggcggggacagagatgaagtcctggggtgagggaggaaccctgggggtgcccagcaccggaggctgcatgggacccctgtggctggtcacagcccccaacatcctcccccagcctcacaaccagggccagcgtgggtgaggatctcggctgcacaggggcctgttgtatgggctccccagggggtccacacctgcaaagccctgctgcatggcctgttttcctgcctgccactcagaggagagggcaaccgagcccctccagctaagcatggcagccctgcaggccttggcctccctggtcctcacctacctcccctctgctcccggtccacacccacccagcccaccctggcccaagcccagcctggtttcgctatcaggaagcaaacataacctagctaagccaggagagcttctgcagatcagagagggtgggtgacagatttgtttaaaatcaaaatacaccccagcccggcccgagcccctcacctgagtcaggccgcccacgcctgcgtctctcccgaaggaggcataggcgccccgctcaccgctcttgcctgcaaggggagaaggaaggttagtgggaggcgaccccaaggaacatcctgagggcccccgagtgcctgccatgtgcctacaataggctctcagtaagtgcacacgactgagagcgccacggcaggatgctggcagagcctgaccccagtgtgcccatctcggggagccctggccccagtatgcccatctcccgcagagccctgccctcagtgtgcccatctcctgcccaatgacaggcttggggacaagaaggggtccccgatgatttcggggccaactctgagcatctgcagcccacagaagccctgcccagggggtggggcggaaaggggacagcagagctcacggggtgaggtgggaaggggacagcagagctcacagggggtgaggcgggaaggggacagcagagctcacagggggtgaggcgggaaggggacagcagagctcacagggggtgaggcgggaaggggacagcagagctcacagggggtgaggcgggaaggggacagcagagctcacaggggatgaggcgggaaggggacagcagagctcacggggtgaggcgggaaggggacagcagagctcacagggggtgaggcgggaaggggacagcagagctcacagggggtgaggcgggaaggggacagcagagctcacgggggtgaggcgggaaggggacagcagagctcacaggggatgaggcgggaaggggacagcagaactcacggggtgaggcgggaaggggacagcagagctcacggggtgaggcgggaaggggacagcagagctcacagggggtgaggcgggaaggggacagcagagctcacgggggtgaggcgggaaggggacagcagagctcacggggtgaggcgggaaggggacagcagagctcacaggggatgaggcgggaaggggacagcagagctcacagggggtgaggcgggaaggggacagcagaactcacggggtgaggcgggaaggggacagcagagctcacagggggtgaggcggaaaggggacagcagagctcacaggggatgaggcgggaaggggacagcagagctcacagggggtgaggcgggaaggggacagcagagctcacgggggtgaggcgggaaggggacagcagagctcacgggggtggggcaggaaggggacagcagagctcacagggggtgaggcgggaaggggacagcagaactcacggggtgaggcgggaaggggacagcagagctcacagggggtgaggcggaaaggggacagcagagctcacaggggatgaggcgggaaggggacagcagagctcacagggggtgaggcgggaaggggacagcagagctcacaggggatgaggcgggaaggggacagcagaactcacggggtgaggcgggaaggggacagcagagctcacggggtgaggcgggaaggggacagcagagctcacggggtgaggcgggaaggggacagcagaactcacggggtgaggcgggaaggggacagcagagctcacggggtgaggcgggaaggggacagcagagctcacagggggtgaggcgggaaggggacagcagagctcacgggggtgaggcgggaaggggacagcagagctcacggggtgaggcgggaaggggacagcagagctcacggggtgaggcgggaaggggacagcagagctcacggggtgaggcgggaaggggacagcagagctcacagtggccctgcttcctgctggccaggcccctgcccttcctgagcctcagtttcctctgtttcaggcgttgaggggctgatgccctggggtgctggggtcagaggcatttgtctgtcccaggggacaggcctgggggccctggcggggagccccggggcctgtgcacaccgcatcaggttcaccgcacaggctcccccaaagtgcccagcattcagccttcaggccagggttcattcgcgaatgagcacgtgacctgcaccccaccaatgagcacttccctggggcgctcagtgacaaaggacaggtgaggcctcggggctacggagggggtcagctggccagggcgagcccccagcatggaaggcctgggctacggaggggaacagctggccaaggcgagcccccagcatggagggcctgggctacggaggaggacagcctgccggggcgagcccccagtgtggagggcctggggctgatgcggtgacacctggatccagccttgcctgaagcaggcaccccgattactcaggacctgagccacttaaatccccttctggctgacactgggcacggaatgtgactggggctgctgtgaggggctgggacgcgcgatcgagtaatgtacattattctcaaagcaggaaaaaaatttcccgatttttgaattttaaaagttcaacgatttcccaactcctggaacaaatgctgctgttttttgcctcccgtttcctcatcttggtgacccggggggacatggggaagatgacagccacgacccaccccacaggccacacccggccacagcagtcactcgcccggctcctcgggtgagaaaactgaggccataggagactgaggttatggcaaaagccccccgtgcctccccgggacccccgcctgccctctccaagctgcctggctatggcctgggccccacccgtgggggtggcaggtgggacatggctgggctctgggcattgctggccgggccgtgggaactgcccacgtcagccctgcccaccctggggccatcgggggtatgaggaagaggctgggaggaaggaacagccagtgaggaaccaggctcccaggtgcaggggccacccccggcaggggggcggggccaggcctcacctaccccgtaaggggaacgggcagaaatcgcccgtggcacgtggtgggccctcagacacacccgccagaccttcacgctattcgcttcctactcaggacaccaactgactctactgtactccaagttcgaggccgggcaaagcgagacaggaccgtccctgccccgctgtggggcccaaacaggcgctgcccctcagggtccagggaaaaggctgggtcggccaaagtcctccgggcctcagtttccccgcaagccaacaatgccgaggggtacacggtgagcacctgggccccgcagcaggtccagtgccccacagctcccggcttctaagcagcgcacacccccactgcaccacgaaaagccagcagaaacactgcctcaaaccgtcgggttccagagaagggaaggatcccgcatcccaggatgactgagggatgaaaccacaaattccacagctgaggcactggggcaggaggctgaccacgacagcgggacccctgaggcccttaccagccccccaagcagcgggacccccccaagacccctacctgagcccccgaaccctggggcacaggacttgacactcccgcaggaggcggagcatgtgaagctcggggcatttcctgtgtcacccgcaggagggaccgcacacgggacactgtcccagtcgcagccccaggtgcctggaggagggcgtcccagtcagccccacccagccgcagacccccggccagggtgcccttcccaagcgtcggttcgttcccctgcagcacgggtgagcctgcagcggggctggaatatacccaagaccaggcaccaacccccacctggcattgggcagggcctgcagagctgggtcagtcctcaccgcctccctccaagaaggttctgggagggtccctttcccacagtggggaaactgaggctcagaagaggatggcgcttgcccaggttccgtggtggggtgggaccagacaccaggcctgagtcttcattctttttttttttttaagatggaatctcgctccatcacccaggctggagggcaatggcgtgatctcggctcactgcagcctccacctcctgggttcaagcaattctcctgcctcagcctcctgagtagttggcactataagcatccaacaccatgaccggctaatttttgtgtttttggtagaagcggggtttcaccatgttggccaggctggtctcaaactcctgacctcaggtgatccacccacctcgctctcccaaagtgctggtattacaggcgtgagccaccgagcccaacctgagtcacgattctctcggttaacaggagggccccccagggaaagagggcgggcgggcggtctgcggaagggcatgggctctgaccaccgcacactctggccgccctcccgagtctccagaactcctacgcctccttcccagcgggcacaggccagcccggctgacccctccccgggaagcaggaggagccctgcagaaatcccagggaggaagtggggtctggaacggcctccctgcctctacgctcaggcggggaagcctagttgcagagtgccgtgccagggagtccgggccacgtcccctgcacctccccgcagctgctcccaggacgggcagaggcttcggctgtccacaccctctgggtgaacgctggggacttgcctggcgctgtgcgtgcactgaccatgccaaggcccacgtctgcacatctgtgcacagcagagggaccgcaccaggccaggcactcacctccgagtcccggtcccaggaatgtggatgaagagaggctgctgtgcgactcagtgaagtgggtgccctcgctgaaggtctaggggagatggggtggggatgagaggtgctggggcttcacaggccccccctccaccccgcattacagctggagaggcaggactcaaacccatgtcccccagtccaaacccctggaaggctggccccttctctcagcctcagtttccccacacccctcgcccccaactctggggacaggaaactcagggtctcaggcctcacggggactcctacccggctggggtcaaaggaggagctgctctggtcgccgctgccccaggagcctgagctgggccggtcctcaagacctgcaggcaggacagagagagttatgggtcaccctcacgcctgcccagctctaaaagcttcggttcatcatctcaggggcaaacctcagtggacccggggggcttgtggaacccttcctaacccagcctcacccagcccgactcatgaggacaccagtcagcagctaacacccagacaccctgggactcggagcacttacaggtccataaacttaaattaactcttccgtcggctctctgctggccaactcctacccacccactaaagccccagctttcataccctccttgggcaaagacctcactctcacgccgagcctcctccccatcagccccaagtccctccctctggcccagccctgactatgtggactggggtctctgtgtcagatgcagactcttctgaccctgtgagaaaggctcatgacagcatgagggtgtggaagctaacccatgagctctggggaggcccagggtctccctgtccccacctgccagtgtgggaagtggggccgccctttgctgaagcagcagcagaggctcacccatcgggcaggaggctggcagcccgtgagggtggagccgaatctcatcacccaggaacaagcccagtgtggagaccagaagcctgcgtggggcaggagttcccggcgcagcaagggacgggacgaggaccttggtcccggggcggggcgggcggggcccttatctctcagaacactcacaggcaacgcccaggactccagaatcttctgccctgggcagggagggcctgcttggatccttcccccttccatcgggggccacagagcacacccgtggagaagcaggagcgggccctgggcctcctcagcttggccacggagttgctgccctgccttggtttccctctctataaatgatttacaaacaggccctacttttgcagggctgggggtgtccatgtccaactcccaagtccagaggcttcccgagagccaggcctgggggacccagcccagtgctgatgtctgtgaccggcaccacctcaggctgttctgcaggctcccccgccccgccccctgccctccctgctcatccacaccagaaacttctttcaaatcgcatccttctatttcggtgcctttgtgttaatcattccccccggggagtattggtgtttaattgctgtctgatttgcataattatgcatattaatctccaagtctaatgaatattcatgcgcctcatttagattttgttttctaatcaaaaatttccaatgtgattatgagtggggggctgggatgctgccttggctgggttgggggccaggcagggggctcctgtggtctccaggaatccacacggcattcgctgccaggtctgggccatctgcaccccaagatcctggtcctgcacgtgggccctggtgaacagggcagctgctgaggccagggtgggctggctgtgtaggggtgggcacagcgccggcaccctctgggtctcagtttgcctctataccacctgcatgttgtctggtcccctccggccatagccagtaccccaggaggtgcagagacccccaactgagcaaacgggaggctcctggcaccccagccctcatcccctggaaggcctggtgtggtgggggacctcctggggccccatgcccagggatcgcccccgaagttcactccaacaggcctgtgccagaggcactgcggcctcaatctgccctttgggggaaccctccctcacccagccttggcctcctcctagaaatgacaaaaataaggacagcccccacattaatacagttattaaaatcccccccaccgattaatgatgcattttaataacccaccatgaatattcataatgcatccattgctcctgttctaattaaaatgtactaatagaataagacactgctgtcagagtgtggttttctgtgatttctttggtgaagcaccgcagagttttacccgggaagggcaccttcctgccctgggccagcctggctgcctcgggagaggcctgcgagtggacggcgcaggggcgctggggagagggccccaggagcggcccaccccttgggcttcagttccaattccagtcacggggtgtggaagccgcccacctgcctgggctgccgtgaggataacaatgaaagatgctgcttcagagaggccatccgtagccaaggaatgctccaggctggtggtttcccagtcccggtccctgttgggtcccctcctgagagggaccggggactggtctttgcctggtggctcgttggcaaatgggagagggaggcttcaaaaggcgcttagtaaataccgggtaggactgagattggtctgcagcagggatctgcaaacagtacacaaggaccaagtctggcccctaagctgctttttaaataaagttttattggcacacactatgcccgtttgtccatgtactatcaacggctgcttttgctgcaacagtagagttgaatcaattccaatagagaccatctgtcctgcacagccaacaatattcactccttggtcctttccggagaaggctggctgaccttgatacagaaaaagactgtccaagtgccttcagctgcctctgcacaagaaacccaatcgacagacttcagtaccaggagtggggttaccatgccgggcaggcaaaactattggtggacacgggccctgaacacagccctgtgtaccgcccctgccaaaccctcaggcacaccaccaggtggtctggcttcagatgggcctggggacttcatcctatagccccagctctgcaatgtgcccccactcaggtgctcaggctaaagtcctgggagtcctcctcaccttccctcctcccaaagaacagcagcttgccccatagctacagcagcgggttaagcccagtccctgcagcagcttccttccaagtctgctgacatcctcaggcagccggatggagcctttagaagcaaaacttggctcttctccctccctctaccctctctcatggctccccaccgtcctcaggataaagaccaaactctttcctgatctcaccactctcctcttccccaacacaggaggtgacccccacccacaccccctgcctgagccccttcccagcctgggacccctctttgtctgcagcactgcctggaacacagctgacgcccccaaaacacccaccctcaacgtcttcattttactcataaataactgtgcttccaagaacattttcctggaggatcaaaatattctccacctctgctgtccaatacggggaccacactaccaactgctggaaacgtggccagcattttttcaagcacattaaaaattacatttaaaaatgtgtatatggctaatgcctgctgtactgaacaacccagtccccaaaagcaaatgaaataacagccaccaccaaataccacggtcacgtctaaaaaccaattaacacctcgacagctcctcacgcaggttccgtttactcgggagtaggagcgggccacccgatacagggtcactatgaccccccaagcccgtgcctcgccccgtctcttcttcctccttataattaaaatcgtgaaggaccccgatggcagcctgtcccaccgccctgcctgggtctggcccctgcagcttgtgatgcttctcagacccattcccagcccctctgggggtcatgacgggtgagatcagacagaggtttgaatccgggggtggcctttccttgggtggagcagtattttaaaaaattttttttttcttttgctttgagacagggtcttgttgcccaggctggagtgcagtggtgcgatcttggctcactgcaacctccgcctcctgggttcaagtgattttcccgcctc[131 bp omitted]gcctcagactcccaaagtgctgggattacaggcatgagccacaacgcctggtgaatttaaaaaaatttttttgtagagatggggtctcactacattgcccaggctggtctcaaactcctggactcaggcgctcctcccaccttgtatttcccaaagccctggggtcacaggcgtgcacagcctccattttatctaaattcaagctatgggagaagatgaaagaccaggatgccctcggcccagctcgcgcactgcagccgccctgggtttatcttcctgtcgtgtcttcttggtcagggcccgcaggctgtgtagcacatgctcccagcttctgaggaggatcccgagtgggggagaaaatgcttctggggcaccacagagcccttccttgttggggggctgacgagatcccgcaaagcctcccacttcgatctgcctctaatgtctggcgatggggggtgggacagcagggccctgtggcccgcccgcgagcagacaaacctgaggctgaagagaatgtgagtggagaccacacaccaccctaagagtgggggtccccacagcacctaaagtggcaggacgtgccctcgggtagaggcacagtgaggctgtgcgggcaacacaggcaacctcctccgccagaaccggggacgcctcgcaacctcctccaccagcacgggggacaacctcctccgccagaaccggggacaactggcaacctcctccaccagaagcggggacaacctcctccaccagaaccagggacaagctcctcccccagaaccaggggcgcctcgcaacctcctccaccagaaccgaggacgcctggcaacctcctccaccagaaccgaggacgcctggcaacctcctccaccagaaccggggatgcctggcaacctcctctaccagaaccgaggacaacctcctccaccagaaccagggacaaccttctcccccagaagcaggggcgccttgcaaccccgctcccccaaggccctggggtttccctggagggcagagctggccccgagagtgggcatcgagcacagatgttaagtaacaactcagagaaacagggccccgctttgaatttcagtgaccacagagataaccgagaccccatcccgctcttgcttccatgtctatgggcatcaccagtgacacctgagtgtggggacc[139 bp omitted]ggtgaaacccccgtctctactaaaaatacaaaaattagctgggcgtggtggtgggcacctgtagtaccagctactcgggaggctgaggcaggagaatggcgcgaacccgggaggcagagcttgcagtgagccgagatcgtgccactgcactccagcctgggcaatagagcgagactccacctcaaaaaaaaaagaaaaagaaaaagagacacaagagggaacccaacatggaacaaaaaggatgaagttcaagaagttcaatgatttaccctaaaaaacgagaagactgtcttaagcctgtaagccccatggatcctcaaagaaatggcagagcctgggggttctatggaatgaagtagacagtgagcacatttaattacgaatcaagagattcctagaagccgtaacaagacaggcacacaaggaaagccctctgggggcactttgtgagttctctctcatttcactgaatccttgcagtggctacattacccctaccctacagataaggaaactgacgcaaaagatagatgccatttgctcaagccctcacagtaagtagcaaagtcactatttaatgatacaaatgtttcctagtaagatgcaaatacacaattatgaacagatacaatgtttttttgttttttttgtttgtttgtttgagactgagtctggctctgtcgcccaggctggactacaggcgcccaccaccgcgcccggctaatttttttgtatttttaacagatacggcatttcaccgtgttaaccaggatggtctcgatctcctgacctcatgatccgctggcctcggacaatgttttttaaaagtagcaatttattggtagcaaataccagcagggaagagaaatatacaggctcaattttcaccttctcacagaagggggcagatgcgatttcacttcggacgttgagagcgcgagaaacggcgtgtttaaacgtgttcttcacaacgcagaatactaaccgctattcaatcacggccttaaacgtgttattcaaaactagaaaagaaccactggcagagccgcaaagcggtacagagcttcagaaaacacacaccgggggaagcaatccggagttgggagcacacagatggaaaaacaaaataagacgatggaaggaaaagctgagaacgaagatggacgggtgcttaacgtctttaatctgaaaacacggtgccgaccaaagacagttttgaaacaagcgactcaggagatacaaccaggagcacaaagatctgccaagccacaccaacaaaaaggaagggttgcaaccttcatatcgaagtttcaattcaagggaggtttctttttctgagacagagtctcgctgtgtcgcccagggtggagtgcggtggcgcgatctcagctcactgcaacctctgcctcccaggttcaagtgattctcctgcctcagcctcccgagcagctgggattgcaggcacctgctaccatgcctggctaattttttatattttagtagagatggagtttcgccctgtgggccaggctggtcttgaactcctgacctcagaagatccacctgccttggcctcccaaagtgctgggattacaggcatgagccaccaccaccagccaaggaacggatttttttgttgttgacaatggctcgacccacaacgaaatcccactgtctcagcccacacaagcccacaatcctggcatctaaatacgtcaacagagaaaccgacaaacagaacagagggggatggcgctgctctcagcctgacattaaacagattaaaaatctaaatatggttcaaaggcctcgcagctccacatccaactatccctcaagtactcacaaagaaggacaaaaataatccatgtttcagcctcggcagaggagctctgcgtcctccaaacagtagctaccgtttaagccaaagctgagttttggcactggagatctagaaatcaagaaaggacctccaacttggaactcagaaacctctgaagcaacctgacctgaagaggaaattaggaaaaaaaaaaaaaaaaaaaaaaaggaacaaatgtcagtaatatgagaaaaacatgcattatggaaaccaatgggatggggttcacggggtggaaccctcaacaccacactgatggaacagaagagggcagaagtcagcaaaaggggcctgtgatctgaaagtcaccaaaaactttagaaagagaagaaatgccgataaagaggaaaattgatcaattgatcaatatcgatttgccaatgaagcagattctccagaagaaaaatcaacgagagagagaaaatgcacagggcagccgagtcaagaacaaagaaaccacctaaaagttggcgcattgaggaccgcggcgccctcagcctccctgcgcaggtggaaagacaggcgcctccaaacgttatcaaagagccgaacggggccaggcgcagagggtcaggcctggaatcccagcacttttggcacgggtggacagacaggc[136 bp omitted]cctgcctctactaaaaatacaaaaaattagcgcaatggttactaaactctctaagtttcagcttctttaccagtaaaatacggtaataattacacctatttcgctaacctgttagaactgagaattcccagtgaataagccaagctttgtgtccaatgcacagtgctcaagaaacactgatgtaagcagtggctcacacctgtaatcccagcacttcgggaggcc[133 bp omitted]ggcgtgaacctgggaggcggagcttgcagtgagctgagatcacgccactgcaccccagcctgggtgacagagcatgactccgtctcaaaaaaaaaaaaaaagtgatgtaaattgt[136 bp omitted]cgaaaccatgtctctactaaaactacaaaaaattagccaggcatggtggcaggcacctatattcccagctactcaggaggctgaagcaggagaatcgtttgaactcaggaggcggaggcggaggcggaggttgcagtgagctgagatcgtgccactgcactccagcctgggcaacaagagcaaaactcggtctcaaaaaaaaaaaaaaagttaatgaggcagcaataaaaagaaaaaaaaaagatacagccaacagcttggctggatctccagggaattatgctaacgtaacagaataaaagctaatctcagaaggttgcaaactataggattccatttacacaaaatactcaaagtgaaaaattgggctgggcacagtggctcacacatgtaatcacagcactctgggaggctgaggtaagaggatcacttgagctcatgaatacaagatcagcctggagaacacagcaagaccccatctagacaatatttttttattcttcagacacggtctccctctgtccccgaggccagagtgcagtggcgcaatctcagctaactgcaacctccgcctcccaggttcaagtgcttttcgtgtctcagcctcccgagtagctgggatgacaggcacgcaccaccacgcccagctaatttttgtatttttagcagagacggggtttcgccacgttgactaggctggtcttgaactcctggcctcatgtgatccacacaccctggcttcccaaaatgctgggattataggtgtgagccaccgcacccagctgaaatttttctttttttttaaacagagacagggtttctccatgttgcccaggctggtcttgaactcctgggctccggcaattctcccatctcaacctcccaaagtgctggggattaccagtgtgagccgctgacccagccctctacaaaatacatatttttttaattaggtggtcgcagctgctcacaaggctgaggtgggaggatcagttgagcccagaacttcaaggctacagtcagttatgatcacaccactgcactccagtctggacaacagagtgagacctggtccctaaaaaaaaaaaatcgtacagatgaagaacagattggtgattcctgggcttaaagaaggtgcatgtctcaaaactgcacagaactacacacacacacacacacacacacacacacacacacgcacgcgtacacacacgcacgcagacacagacgcagacacgcacacacgcgcagacgcacagacacgcacgcgcagacgcacacacacgtgcgcacacacgcacgcacacgcacagacgcgcacacgcacagacacacacccgcacgcacacacagacacacacacgtgcgtgtaaagccggtggaatctgatcaggatctgtggacggcaccaatgtcggcttcctaggtctgacgcagcaccacgggtgggcgggacggtacccctgggggtggctaggtgagaggagaacactctgccacttcctgtgaatcccgaaagacttcagaataaaaagtggatcaacttcaaggacgagggcccaagagagtaacagaaaattcaccagagagccattcacagggtcaatccccttccgagaagaccaccgccctctattaaacaagtggcaggtgaaaggacacgatctttgtcacctattaaatgagacaggccgtgctgtcaccacgttggccaggctggtctcgaacacctagtcccaggtactcctcttgccttggcctcccaagtgctgggattacaggcctgagccaccgcgcccggtcacaagggacgctttcaatgtgaaaaagcatccagggacccagcaattccactcccagacacgcacccggaggaaatgacccatgcgccaggttctcccggggtttcctcttaaagcagaacgcggaggtgccgttctgtggattttcactctgaccgtgtgtcacacttacaatcgcacggacagagaaagcgacggggaaatgaaaaataggaaagaactttcctttggtccgtcaataagcaatttcctggtgtctcccgtggcctcagagcctgtctgtcttggcagaagataggctgtcactcagagacctgtgcctgagggtttccaaaaatgggaggcggtgggtgggagaaggcgtacgaaaattattcccgttttaaatgtcttccgatccagacaaccagaaaatcttggtttcctattcgttaatctctaatgccttttttgtttcgtttctgttttgagacagggtctggctctgtcacccaggctgcagggcagtggcgcaatctcagctcactgcaacctccgcctcccaggctccagcaatcctcctgcctcagcctcccgagtagctgggaccccaagtgtgcgccaccacgcccagctaatttttgtatttttagtagagatgaggttttgctgtgttacccaggctggtctctaactcctgcgctcaagcgatccttccgccttggtcccccaaagtgctgggattataggcatgaaccactgtgtctggcccttttctgtttgtttgagttggggtctctcagtcacccaggctggagcgcagtggctcaaacatagctcactgcagccttgacctcctggcctcaagcgatcctcctgccttggcctcccaaagtgctgggattaaaggtgtgagccaccttgcccagtacctaactcctctctcgacaccaatttttaaatatttataaatatcgaagaacaggcagacccttcacaggggaaaacttatgtttaattaattttcagggacaccttttattctcacctgggtttctggttctcaaatctaaagtttcctttcaaatgaacttaagaaaagcgaggtgacttaaaagggagctagaacagggcacatgaagaaggggccaaggtggagaatgcggctggggtaccccatcagccatcagcgttggggactcctggcgaagggtggcgtccccgaagccaactaggccccgcctggaaggaagctgcacccactgttccaggaagaagccgaggtttgggaagggatcccacagctccggggctccatcctgctgatgagccccaaactcccctcttcctgggtcctcggagaggagaagcaggaagcggggaaatgagctactgcagctcctgggccctgccgggatccctccgcccctcgcacccatcgactcgctgaacctgacgatggaagagagcaggtgcccatcttgcgggagcttcgggagggccacacctggggccagcgccacagcctgcaggggcctgggggagtggaggcaatgaggagggtgccaccaactcaggccttggagctctgcatcctccaccacccccgggctcaggcgggcgttaactgcatggactgaacggggagggggtcacccctctgtgtccaggagctggggggtcccaggctggagcagccacatcacgtccctcaagggcaaaaaatgcaacatactgggcctcactgggccctccaaagcctccgccctaacgtgtgaggggacaaggcgagaccctcccaacctgcagcattggggcagggccggagcacagggcgagactctgtgggaaccacagaaaatacatctgcaaacattggcaggttcctgctgggaccgggctgggcgtccagggagaggcaacccagagggagcattctcaggtccacacggcctacacaccacagctctggttacccagggaccaatctcacagtggtccgtgccagggctgagggggtgagaggcgacaggggacgagggaagacacctcccaccccaccctccccaccaggccctgctgtaagcccacccagaggcccaggagaatgggggtggacggccttgggagttgcgcttcctcctccaggaagcccccagggcctgaccctctgcctcacacagggaagcattagcatgtccggttcctggggctgtttccggggggctggcagggtggcgtttggggatttccacgcctcagggagcatattccggccagccctgtggccacttcctcacgtagaggggaaggccagtgtgaggcagtgggggcagcaaagcgatgtctctccatgtgggggtgcaagtgcccaagtacagaaccccctttgcccaccactcaaaaccccgacactccagccagggcccacccctgggggattctggagataactgcaggacggcgctttccacccagatcccggaggcaggaaggacacagcttcagaggccccaacccgaggcccccactccccggaaagatgctgatgtccacaaagagacccgtggctctgaagcagcatcgggggcacccgccccaacctcccccaccaaatcctgtcgacagccagcctgggccgcccaaatgcacatcagactagaccctctctccattcacaaccatccagggctccccgctgcccctgcaacgaacacagcgcccctagcccgccccgccggccggtcccaccgcagggcgtccgtacgggctgctctctctgcctggcaaattcctcccctcatgctcccacggccccttcctctcaccctcagggctctgccccgacacgccctctgcggagaccttcactagaggtcccgctttggggcaacctggccctcgctgggtgtgccgtgaagccctgcccatgctccagagtgtgattttcaggccacccccaggaccccacgtctcccctatctgtcccgcccactgctgtgtcatcagcgagggtgacccgctcatccaggtcagcctgggatgtttctgctttgagcactcaaagccgcgggtcccaggaattgcccctcagtcctgggcaaaccacaatggccggtcaccctggtgctgggccctgcatacagcaagcgcctaatacctgcttaaatgaaagtcgtcgaggctcacaaggtgggtgggatccagtgagagccgggatcccgcaccacgccctctccagagcctcagtttcccccttatggattgactggagaaacggatgctcgagatccccacccacacacaggcccagctccaaccctgcgcctaaaaacaagccccacccagcccccagacccaggctccaggcgcgggagggacgaggggacgaggggctcaggggctcgggctcccaaggcaggtcacacgggcaacggcagctgatttcaggggtcttcaggctcgctgcccccgacccggcctgtgtggccctttccccattgtctccctcctttgctgccccagcctccctcgcccgcacactgtcttcaacagacccttgatctcctcactccacgagcgctggcaggaaggcggggtcctacctgaacctccgaactgcgccccggccagggaggcgggccggcccttcccgttggtgacaggcagcgggaacatctgcagggaggggaggggagacgtgagcggggcgggtggcaaaccaaaccctacagtcccgggttcaaacccaagctgggagcagagctggggacacccgggaacctgagactgcgctccatctaggcccggcccgtcctgctccgccccatcacagaccagaagactctgaggactcgcgtgccctcaagtgacgctgcaccctggacacccacgcccagagtgagaaaactccagacgatgaccccgctgtaccgccaggcagagtccctgccgctgaaaactcgctgttccccctgcctttgctctggggggaggggtatcccattaggcgaaggatacaacttatcagctcttgacagtgatacaaagttgtctttacgtttcagctctgaaaagtgagaggtttacactcaacaggtggacatgtggagagtccccggatgcctgagccctggctgactcctcgtttcctgtgtgtgcactggccccgcatggcaggccctggagcagggggtccctggagcggggggtagggcccagtgtccccctaccagggctgggtatgggtttgcttggcaaaaggggaagccgaggctcagacaggcagcaggtcgaggaagacacgggatggagccccgggcccggcaggaagctggaggggctggggagaggctgcaccccacagctgatccagctcctgggtgctaggggtgtgggactgccaccctccctcccgcccggctcacccgtacccagaacactaagtccctaaagattaacgggctcagcggcattaaccggaaaagccaacggcaacaaacccttttgccacagaaaaaaacacaacaagcctccgccctgccccaaggggctgcgttttaaggctcccatcggggcttaagtgatcaaagtggctggaatcagagccaggggctttctgaggagcagccaagatccccaacaccttccccagccagccaggaggcgaaggcacagcgcctgtggccacgatccacaggtccaaaggggacccaggaagcggggttgtcccccactccctggtcctgcagaaggggaaacggaggccgcattctcacctggccctggagaggaagaacggtcttgcgggtaggggtggcacccgcgctgaaggcagtgttcgccctggaccacaccccctcccgcaggctccggtgcacccagcctcccctggacccagacctccaagggccaacctctcatttgggaaacaaaggcctgctgtgggggacagccaactgcatttctatctgctttgtcccctaggacaccagggctgcaccaacgtgccacaggtcacatgggtaccgggctgtgtcctgtgggctctgcaggcctcatgagcagcccagaacagcccccgcaccccttggagcatcagtttcctcttctgagaaatggaccgagggctctggctgtgtgggacgtggtgaaacccaaaagcccatgggagtctcgcacgcggcagggcctggggagctcgcttccaacagcctcggtcctagggactcgctcccccttcattcctgaagcccctgactcaggcccagggactgcctgggacccaggcagggcatgtcagcccaggccagtgctggcgggtccttcgttcccgaccaaagctagcctgggtcagggcaggacaaaggcgcgctgggaacagcctgggttagcgttctccctcgtatttatttggagttccctgttctctcactttatacgcatctggtccagggaagtaagtgcttcccctaggacccagcctcggcaggggcagaaggcaggcatgcaggaacagagtggggatgcgggcagtcacaggggctgcctctgcctccccgtcctggccagggaggtggaactccacctctgggtaaagcccgaggggggacgcccggagaggacgggcacctcgccgctcccagcctgtttcctcatctgggaacggctccgacccgggatggggagacgtgctgagtggcttgaggtgaggagtcaggtcctggggctgaacctgtgccccctccccccaaacgctggtctgttccagcccagcggtctgtgacttgtcagtttaacaaaaaacaacccaactgcacctcgggttactcagccagggaagcaaaaataaaacggggcttaaaaataccagcatggcccttccggagccttggcccctccggcccttgggctgtttttttccgcagggtggccggtgttgtttcagtttggggacttttgtttttgacagacctcagtggcctgtgcctcataggcgggagggttaaattcagactgaaagtgccctcccccaacctgtttcaaccccaaacgctgccactgggcatggggggggggggggagcagaatttaaggacatctgtagacaggccagaagaaacaaaccaaggtccctgggcttctccaggaacccataacacatggccccactgtaccagcaggcaaaccgaggccccgggcctttacagcacccgtcagcggccggtaccccagggggctccggcattccagcctcactgcacctgcctgaactgtgtgacttctgaggaccagcaccctctgagcctccgttcacccaggtggagaatgggccgtacagggacagatccaaccacctaagactctgaagaagccgccccgccctccccaccgggcctgcctgctccgcagtgataaccgtggcagtcacaatggtggcgctgctgtctgctcggtggcccatgaattcccactcaatcccaatccagcctcctcctggcccaagctcggcttctggcagcttaacttcagcacccacgtgtgactaattaaccacacagtcagtttcatgcccgcatcctctgcccaccaggggagtcccgtatggggcaggttgtgtctgccctgttcacggagggtggtccgctcagcactgggcaccccctcctttacttctttgaggaaggatcttactctatcgcccaggaaggagtgcagtggcgcaatcacagctcactgcagcctcaacctccagggctcaagtgattctccttgcctcagcctcccaagtagctgggaccacaggcatctaccaccactcctagctaattttttgagttttgttttgtctttttgagaaatggggcctcactatgtttcctgggctggacttggaactcctggcctcaagcgatcctcccgcctcagcctcccaaagtgctggaatgacaggtgggaaccactgtgcccagcccccctcccatttactgaaacagggtctccagggtctcactgtcaaccagactggagtgcagtgatcttttacttacttttaatttttgtatctacaatgaggtaagcgaccctgatcaggcccattttacagatcagaagatcaaggccgcattttgcttacccagccaagctgggggcccaggaccatgcccctgaggactcagtttccccatctgtaaagcagtaggctgtagaatgctgcgtccgggcaaaagccccatagcacacgtgctgccgtgcgctgtcagcctcctgccagagagcggcccactcccccagccccaccggggcctcccatccaaacagctgaggctccatcgctgaagtattcagcaaacactctcccctgaaaaccttcccgtgaactgtggaggcaaaggggtgtcgggggctgggcgggggtcctggctcaccatgctgaagtccaggaggtcactgagctccttgtctgtgcccacaggcgccatcctctgcggctggttcattctcctggggccagggcgggcacctcaggcctggaaaccctgcttggtggatgtggggacagatggacagggagaaacagggaggggagaagagttgtgagtggtcaaagcacagagtgctaaaagccacctaaaaaaccctcaaccgccctggggtctgagttccagcagagccctgggggcacggggagccctgggagcaggcgcagggaagctggaattccagagtctaggtccctgcagagtcctccccagagaccacagggagtctgaaaaatggggggagggtgtgcaaatataaactccctaactcccccagggaacaccagggcatcaagttgccaagtttaaactgcacgcagggcagccagaacctctcctttctccaactctctcatttccaaccaaccccgggcttcctctgaggccccctacccccgggaaagggaggaacagcccgatcctaccccgccccgagggaaatttggtgattcccccctcccccagcagatggcacagcccgttgaagaccaggtcgcccccaaattcaacatgaaggaaatccacaagtcagaaaaccacgaaactcttttacaagcttcaagacttaaagtgccgggggtgggggggacgcgcatcctatgcagggaccagcaaagctttcctccaccctcaatctccctccccccaagaaaaccccaacagtattcaggaaagaaaaaaaaaacagccctagattgctttactgtcgcgatgtatccgggaattatttttaagcaaaactttgacaacatcccttgcctgccctccatgagcggggagagcgtctcaagaccagggtgctcccgcgtggtcccagggggctccattctaagatgggggatgggggatccacctgccaagacccattccacccccagaaaaaggtacagagaaaaatttccattccaaagaaatgcactccaggcccctccagtctcgactttccccaggggtccccaggtggggacgggggcagcccgggagacacctccgaggctgggggtggggaggagcctccgaggtcgagggagacccaacttcagaagcagagaaatcccctctttgtctgccaactggaggccgggtgtgaagcgggcgccccagcgcagcccctcccccgctcagtttttttcttttttggagggcgtgtgaaactgactttttttgaggactacgaaaccgcacttttttgtggggtagctgaaaccgattttaagacagacttagttgggggggtggcgagctaaaacgggcattctacgggagctggaagacttctggggcgtcccaaggactttgagagacttggagaatgtttgaagccactttgcacggcgccgaaggcggggggcgcgctggaacgcctttttcccggggggaggcggcccgggaagccggacccccctccccccgcagccggtgcaggcggtgcggcccgggagcctttgaagctcgcagcgcggccgccgcctcgccccgcattaacgcggagcagatgttacccgcgcgcccccccccggcccgcccggccccgaccagcgcctgcagcgcgcggcaccttccccgcgcagacaaaaggacgtccctcccgcgcgctccccaccccaaactccggcgcccgggccgggcccccctctacccgagaaagggggcgccccggggtccccgtgcgcccgggctgggggggacggtcctcgcgcctaagttgcacagcccgtccggcgccccccgcgcccccgcccggggctgcttaaagtttcccgaagtgcccggcccgacgggggcgacgcgggcctggcgagctccgggctcctccacgtcgccgcccccccggcgccgcgcgaagttggagaacaatgactcccgggccgcggggcgccccccgacaccgcccccgccccaacttcctccgcgcccccccccaacaagcgcgcgcggggcgggccggggttccctgggcacaaagcacgggggtaccgggcgcgccccccgccccccgccgggctcacctgctgggcgcggccgggcacgcggcgcgtgggggggggcggcggcatgaagcgggggggcccccccccggacaaaggtgcgtcgcggccgggcccccgagggtcgcgcgtgggcggcggcggcggcgcgcgtggcccgggcccctcccacccccgcgtggcccgtcccgcggggcccgtgcgcgcggccggccggggcgcccctggggcagcggcgtgcgcggtgcccgcggtgcccgccgccgcgtcggctccggcccgctacgcccgcagccgccgccgctgcctcatcttcctgcggcgggagacatgttccgccccccgcccgcgccgccccgccccgccccgtgcaggccccgcccctgccccgcccccgagtgccccgcccggcggcccacgcggatccctccgccacctccgggcggctcgggcccgaacgccctagctcggcctctcgagcaccctcgtgaggaccccgaatcccgtgaggtccagagcctgggagcggggacgcgcagaggaggcggtcgggccacggcgcggggagaaatcacggactatccccgtccgcggaagcacacacgagctgtgcgcttagtccatgacgcaagcgagtaaggcccgtgagattgaaagctaaggcagagcagtctggtcaatcggaagccgcgaaagtctgatgggcggggatcctagccattcgtggtgaggccccgcctcctttcttctcggccccgcccctcagcagaggcgggactctgcgagcgagaggccgcgagaggcggccggggtgggtcctggagttttgttctcaggttggcgtggccgcccgcgcggagccttctgcttggttatatttgcgttcctcgggccggccccgcgtgctgagtggtgcgagcgggtatcacggccccgagggggctacgtcagacccattttcccggcgggaaaaccgactctggctccggctctgggtcagagagccccgcggggagtctcagcggtgcctttgccgacttgagtctccgtctcggcatctgtgaatttggacctgactttggacagaactcaggccagatctggcttcctgattcttagtagtccgtgtctacattttagtaaaaagtgaccccgcctaggatcgggcgccgtggctcctgcctgtgatcccagcgctttgaaggaggccgaggcgggaagatcgcttgaggccaggagttcgagaacagcctgaacaacatagtgaaaccccccccacccacacccgtctctaaaaatatttaaaataatttaaaataataatttaaaaagttgaccggacgcggtggcccacgcttgtattcccagcactttgggaggccaaggcgggcagatcacctgaagtcaggagttcgagacctctctggccaacacggtgaaaccccatctctactaaaaatacaaaaattagccgggcatggtggcgggcacctgtagtcctagctactcgggaggctgaggcagcagaatcgctttcacccgaaaggcggaggttgcaatgagccgagagcacgccattgtactccagcctgggcaacaaggacgaaactccgtctcaaaataaataaataaataagtaaaataaaataaaaatacaaaaattagctgggcgtggtggcatacacctataatctcagctactcgggaagctgaggcaggagaatcgcttaaacccaggaggcagaggttgcagtgagcagagatcgcagcactgcactccaggctgggcgacagaacgaggctccgtctcaaaaaaaaaagtaaaataactaaacaaataaatgaaaataacacaatctcccagggctccctggggccccaaagggaaatttacactccactcccagcctgggaagatgccaccatctcgctggcccgcttggctccagccatcctgccctctggatggtccagaacttgctaagctcatccccaccccgggcctctacgtttgctttgtcctctacctgggaggcttttcccacccctatctggagcccctgagtcatcacagttcaatgctgcacctatgccaggccggcggggaggcggggccacaggggccccccaccaaagccacaagcccctcctgctatacacccaaactgggctgtccacagtccgaccctccgtgcccagagagttccacgtgccgcaggtctggggagagggctgtgggtcccagggtctgtgctgcaaatccctcatccctctccacctcactgtgacctcaggcaagttcgtgctactctccgggcctcggtttctccatctggacagtggaaggggggagtctggcacacagtaggtgctcacagctgatgcctgccttcctcagccgccccccacccccgcagaggcctctccggagccagggtctccaagcagctccaatcccaccccagcctcctcagcccccggcccttccttgtggcccagccctgaccccatgggtctgagggtgtctgtggccgggtctggctctccccattccagtgtagggagctcactgtgggccactccccacccacactcagggtccaagccatagtgtggcagccggagtcctcccgaggagcccttcagtttcacccacggaagggaagcaaccatccaatcacggacttcttcttcttcttcttcttcttcttcttcttcttattattattattattattttgagaaagagtctcgctctgttgcccaggctggagtgcagtggtgagatcacagctcactgcagccttgacctcctgggctcaaacgatcctcccgcctcagtttcccgagtagctgggaccacaggcacgcgccaccacacccagctaattttgtattttttgtagagacggggttctccctatgttgcccaggctggtcttgaactcctaggcacaagtgatcctcccgccttggcttcccagagtgctgggattacaggcgtgtgccactgcgccgtacaagactattcaattatcgggcactgacagcgaacggggccttgtgccgcgcatcgtagcactgtggacagtgatggactcagtccctgctgtcccggcaggatgacccatgagggaccccttgtctagtcctgaatgtggctctttcctgtgaggtcctcctgcctgtgtggttccacgtatcgtacagatgaggaaactgagactaggggtctcctccctgggccccagggcaccctggggctcgcgcctgccaggaggttccgctggtaaccacaagccaccattgttttccccaaggaggtcagtcctggggctgagtcactgggtggagcagcccgtgggggccccccacttggccaccacctctgcccagccccgaggcctgggtgctccctccagggccctggtacggggacaggcagcaagctatcctcctgactgtggcctttgttttgctctggggccgggcaggaggaggagcagggcctctgcacctgccgcctgttccctccacacctactgtgtgcgcccccgccaacatgaaccacgtatgtcagaaaaactgaggccaaggacaacttcccactagggagacacagaagcgaggggggcgaggggcggcgatggcgaggtttccagagacagacgcagtaggtgtgcaggccacagctgtccgcagagagactgggcttggattaggacttcggggccaccctccagatttctgtttccatttgtccctaaagtgggcacctttgacttctcccagggtatgaacacactcccccaacccccagcgccctccagcaggggcggagaagggagtggcggcccagcacttatcacccacgtcaggccctgggacaaacctcgctccggcgtccactgagcacgggcagctggggcgatcggtgtcgcctcccaaagtgggggcttcctgctcgagctcagacctccagtgaggggcctgatcccaacacgaccagatcaggaccaccccacagagccctgggctgggactcggccagggtagggcccattcccttattctccacaacttcgtttttattttattttagcagagatggggtgaggtggaaggatcgcttgagcccaggagtttgagaccagactggacaacacagcaagaccccatctcttaaaaaaaaatttttttttttagatgaaatctcactctgtcgtccaggctggagggcagtggtgccagctcagctcactacaacctccacctcctggggtcaagcgattctcctgcctcagcctcctgagtagctgggattataggtgcccactgccacgcctggctaatttttgtatttttttatagagacggggtttcaccctgtcgcccaggctggtctagaactcctggcctcaagcgatcttcctgccttggcctacccaaagtgatgggcttaccagcatgagccaccacacccggccccattcttcctgccttctgggaggaggcgtctccaggcttgctggttggacctgggcagggaagcctcctgagattgggagtgctaggggcttatgattgttctcccctagcggagggaggagattctggtgtgaaatggagcagtggggacacactccagttcctggggtctgatcacaagggttcctgactcctcgggcacttccagctatgaggacaccaaggaagggaagaggcttgtcggtgatcagacccctacccctccacccagacttatgggagccagagggccaggagagctgggcaggaggctctgaggttgacgggaatgggaacacagcctcacacctcctgctgtagggcattcaggggaagaaggaccatctcccacagggagtgggtcccctggggcagtgactcttgggctatgacctcaagatgcatgcggtcgacaggcagagagcggataccatgccaggcaggggaagctgagggacaaaggtactgaggtgggagggggtgtggggtgttcaaggaacggggcctgtgaggctggagcccagagaagaccagagaagaggagccaagatcagagagaggggcagggcctcctatgccacagggaggaattgggtcttcatggtgagaggactagggaaccatggtgggagtttgagcaagagacggacgtgatcacagggaccatgagttggggtggatctggggtacatttggaggataactgagggctctcccagggggtgggtatgaggggttagcagcctgcctactaggtgtggggttagggacctgggcctgtgaatggtggtatcgttctctgagtggggccagcgtgggtcaagggagaggcgtgaagggggaacaggaggctcatgtcccagggtggtgtccaggccccatgagacaaggcgggtcatggccaggaggggctgcgtgagagggggcaccagtgaagaaggcacagtccccagtcggggggagcccagctctggatgcagcctggcctccccgagccctccttctgtccgagccccccacgcagcccctctgcacctgccgggtgcccgtccaccccagggccagggccaactgccgaggatggtcccaccccctcttggccaggcgcccacagctcctgactcaggggcccccgggggcctgtcctgccacattccggggccgcccgtgcaaacacagggcgcctgcccatcaccccccatggggcattgtttggcccagttaccccgaggcgggggcagggcaggggacagggagcccagccagattctcagttcccgccacccatgcacctgcccacaggcagccctgctgacctgcacccgccttgacatggggggacggcgcctctgcagtgtaccctgggcacaatgggggcatctcccttcttcccgggggtcttcacctcccctgaactttgctcaaggcacagaggacgtcatcccattgttcagatggggaaaccgaggcaggactcaagtggcctcatgcctgaagctgagccaggctcccatccccggcccacctgtcctgtcccccaccgaccccacctcaccccgccaggctccttcacctgcacctggtgccttccagaaacgggggaggccactccaggctgtcagccctctggcacaaaggctgggaggtcagaagccatccagggacgccttgccacgctaagaaggttgggtttcattcgcgggtttggaggagccgagggggccacgtggtctcactgggggttgggaagggcatctgggagaccgaggtggaggccggtgacgtggctgtggagtgggatgcccaaggcaacaggaggggtggaaagagatgcctgttagacgggaaactgggggggcgcccctggggaaagacgacaaggatcctaggagggcggggagcacaggtgcccccaaccccaaggggtgagaactagactcaggaggagactcagggcttgggggctgcagggatggctgcctggagctgagcctgcaaagctggaacagggaggaagggtaactgagcagagggaacagcagaggcaaaagctacgagacgaggaaatgcaagttgttccctgggtttgggccgagggccagggggcgggggcgggtggcactgatggatgtgccacccacccccatccgggccatcctgtctggatccgggaccctgccctcgcccctccctccctccgtcagaccggccctgcactccacagacattgtatgtcttgctgctgcccagagcccgaaagtccctgcccacctccccgtctccgccactcctggttgtccctccaagcgcctgttggtttctgggcctgtttcctggctgtgtcctctcctggaacaactttcctctctttgtacctggctgtcttctcttcctcatccttccaccctcagcttgggggccacctcctccggggagccttccttgctttgtttgtttgtttgtttgtttgtttgtttgtttgtttgtttccagagacagagtttcgctcttgttgcccaggctggagtgcaatggtgccatcttggctcactgcaatctttgccccctgggttcaagcaattttcctgcctcagtctcctgagaagctggaattacaggtgcctgccaccacgcccagctaattttttgtgtttttattagagacggggtttcaccatgttggccaggctggtcttgaacttctctgacctcaggtgatccaccccccttggcctcccaaagttctgggattccaggtgtgggccactgtgcccggccttggtcggcagttttctaacagctgggggtggctgcgtgtgagacaggagagggtgagcaggaggtgctgggatcagaagaggctcagcaaaggttggccccacacccagcccccttgtccttttcaggcatagagaagatacaaaatccagaaccatgcaaggagaaaattcttcaaatttgaccacacaggccagacacggcagctcatgtctgtattcccagcactttgggaggccaaggcggcgggatcacttgaggccaggaggttgaggccaaccttggcaacatagcgagaccaccatctctacaaaaaaaatacaaaaattaggccgggcctggtggcatgtgcctgtagtcccggctactctggaggctgaggcaggaggatcacctgagtctggggaggttgaggctgcattgagccatggttgtgtgactgcactccagcctgggcaacagaacgagactcagactcaaaaaaaaaaatgttttttaggctgggtatgatggctcacgcctgttatcctagcgctttgggaggccgaggtgggcagatcacttgagatcaggagttcgagatcagcctggccaacatgatgaaatccactctgtactaaaaatacaaaaattagccgagcacagaggcaggcgcctgtaatccgagctacttggaggctgaggcaggagaattacttgaacctggaaggaagaggttgcagtgagccgagatcatgccactgcattccagcctgggacacaagaatgagactctgactcaaaaaaaaaaaaaaaaaagtttttcgactacataaaaattaaacacttttgtgtggtcacagactcacaatgaagttagatgagatgagaaagctagggagaaactatttgcaacatcataacagacaaagggtttgggctcttcgtatacaaagagttccaacaaatcaataaggaaaaaactcaaaaaaaaaaagaaaccatgcaaagaaatgagtgattaattcatacaggaaaaaattaaaatggccactggatacacagacgaataaaaaacctaaagtcactcttggtgaaaaagatacaaatgggccgggcgc[208 bp omitted]gcttgcagtgagccgagatggcgccactgcactccagcctgggtgacagagcaagactctgtctcaaaaaaaaaaaaaaaaaaccaaactaataaatctaataaaaatggtggcatgaccactgctcacccatgccaaggccgttttttaaaaacaagacaaaacgtgacggcatgagcagggctgtgcattagaacgtggtttgtggcacagaacacttgatttgaaaactgcccaagtgtccaacaacaagggctgtagaagaagattctgtcatggctgcactaggaacccgactgttgaccgtccagcaagtcaggttcccgtgcctgcttggagccaagagacgcctgaggccgcctctctgggggaatgaaatacaagttaaagacccgccatgccacttttggttgaagcttttgtaaaggaaaaaagcatattgaaaaagtgcaggaggaaatgccccaagggcttggtggttactctgggggtgggggacactttcagttcttactttatcttttttttttttttttttttcactctgtcgcccaggctggagtgcggtggcgcgatctcggctcactgcaagctccgcctcccgggttcacgccattctcctgcctcagcctcccgagtggctgggactacaggtgcccgccaccatgcccggctaattttttgtatttttagtacagacggggtttcaccgagttagccaggatggtctccatctgctgacctcgtgatccacccgccttggcctcctaaagtgctgggattacaggcgtgagccactgcgcccggcccttactttatcttttgaagaggcaggattagcttgagagtttacattggacattattttctcttttccttggttgaaaatgtttgttttgggggccgggagtggtggttcacgcctgtaatcccagcccttcgggaggtcaaagtgggaggattgcttgagtccaggagttcgagaccagcctgggcaacatagcaataccccatctctaccataaattaataaataaaattagccaggcatggtggtgtgcaactgtagtcccagctactagggaggctgaagtgggaggatcccttgagtccaggagttggaggctgcagtgagctatgattgtgccactgcactccagcctgggggatagaccgagaccttgcctcttaaaaaaaatttcattttgacaatatgcataaggccacatgcgtgaagctcagttggaatgtcacttgcaacatcataagaggcaaaggatttgggttcttcatatacaaagagttccaacaaatcaataagaaaaaactcaaaaagaaaaccatgtaaagaaatgaatgattaattcatacaagaagaaatgcaaatggccactggatacaaggccacagaatatttggaaggtgaggctgacaggagagctgctgtcctggagacattgaataaatactgccaggggccgggcacggtggctcacacctgtcatcccagcactttgggaggacaaggtgggccgatcatttcaggccaggagtttgagatcagcctggccagcatggcgaaacccccctctgctaaaaatacaaaaattagccaggcatggtggtgtgggcacctgtagtctcagctactcaggaagctgaggtgggagaatcgtttgaacccaggaggcagaggctgcagtgagctgagattgtgccacagcactctagcctgtgtgacagagtgagattccctctcaaaaaaaaaaaaaaaaaaaaaagactgccagcatccacttcatcttcatgttctaagatgatggtttatctttgtgtgtattttatgttttttagttttaattttttttttttaagagatggggtctcagctgggcgtggtggctcacgcctgtaatcacagcactttgggaggccgaggcaggtggatcataaggtcaagagatcgagagcatcttcgccaacatggtgaaacctcgtctctactaaaaatacaaaaaattagccgggcatggtggcgggcgcctgtagtcctagctactcgggaggctgaggcaggagaatcgcttgaacccgggaggtggaggttgcagtgagctgagatcgcgccattgcactccagcctgggtgacagaatgagactccatctcaaaaaaaaaaaaaaaaaattagctgggcgtggtgggcgggggtggggggcgcctgtaatcccagttactcaggaggctgaggtagcagaatcgcttgaaactggaaggcagaggttgcagt[131 bp omitted]atggctcactgtagcctcaaactcctgggatcaagccatcctccatccttagcctcccaagtagctgggactgcaggcatgtaccaccacacctggctaatttttctttattttgtttgtagagacgggatcttgctatgttgcccaggctggtctccaacctctggactcaagccatcctctcattttggccttccaaagtgttgggattacaggcatgagccaccatgcccggacccccgccaccccgctttttttttttttgagacggagttttgctcttgttgcccaggctggagtgcaatggcgtgatctcagctcactgcaacctccacctcccgggttcaatcgattctcctgcctcagcctccctggtagctgagattgcaggcgcccaccaccacgcccagctaattttgtatttttagtagagacggggtttctccatgttggtcaggctggtctcgaactcccaacctcaggtgatcagccccacctcggcctccgaaagtgctgggattacaggcatgagccactgtgccctggtcccggccgctttttaaaattaaagaatgtttagtttttcacctcaccatagatgctgcatgactgagattgcagaaccacagaacgggcgtgggtgggcttccaccggggcaccccctcctcctgcaggatccgcactgcccgggcatttccctgggggtggggaggcctcttgctgtcccagggttccctgggggaaacccctggtgtcctggggaggccccaccaggttgatcgtgagcttgagctcagggcaaggagcactgctcagcgagtccactgtggttgtggtcacacgatggtgtgagctctcatctgtcaaaggagtttaacaagagcacccaccagggtgagttcaatctgtccatcgaacgcaacaggcccaggccccggaggcttttagggcccatgaaaatgtctgtcttccttcctccctccctccttccctccctctctccctcccttcctcccttccttcttttctttctctctttctctctctttctttctcttctttcccttccctccctcccctcccccctcccctcccctccctccctctctctctgtctctttttctttctttctttctttcttcctttgttgcagagtcttgctctgttacccaggctgcagtgtgatggcacaatctcggctcgctgcaaactctgcctcccaggttcaagcaattcttctgcctcagcttcccaagtagctgagattacaggtgcccactaccatgcctggctaatttttgtatttttactagagatggggtttcaccatgttggtcaggctggtctcaaacccctgacctcaggtgatccacctgcttcagcctctcaaagtgctgggattacaggcatgaaccaccatatctggccaaaaatgttttaatttcttttaaaatcagggccgggcactgtgtggctcacacctgtaatcctaacactttgggaggctgaggcgggaagatcgcttgagcccaggagtttgagaccagcctgggcaatacagcgagacctcgtctcaaaaaaaaacaaaaacagaaacaaaaaaacaaaaagccaggcgtggtggcaggcacctgtattccagctactggagaggctcagacaggaggatggtttgagcccaagaggttgaggctgcagtgacccaagtttgtgtcactgcactgcaggatgggagacagagtgacaccctgtctcaggaagaaaaaaaaatttaatcagaagaaaaatgatgaataataattgttttccgatgaacaataataataacgaattaaggccgggcacagtggctctcacacctgtaatcccagcgctttgggaggc[134 bp omitted]gaggcaggagaatcgcttgaacctgggaggcagaagttgcagtgagccgagatcgtgccactgcactccagcctaggtgacagagtgagactccgtctcaaataataataataataaattaataataacaattctagtctcaattttacttttttttttcaatagaggaaaggactcaggatggcaaaagtgacttggtcccagacagccctacagggcagtcctgcccgggaaggagcaggtgctctctgctgctgaggcccctagcagaggctgggcctctgggtctcccagcaggtggcaggggtgtgagaaggggaggcccctttccagaggccagggacggccccaagggctgcccgggagatactgggtcatgtgaccccccggagccaccccctgaagcttggtctcaggttttctatttgcttcagactcttgttagtcccccccagctcctgctccatcaggcctggcctccttatcaccccggctgtctgggtgggggcatggccccctcgtaacctcagctacctgcagggcagggcagaaccccgggtctccggccggtccgtggccggtatgtacctcacgcatacagtctgcacactgggcagagacagacaagaaattcaccagccactcctcactcctgtcctgaccctgaacctgaccctgtcagggagacctgggctgagacgggatacagaactgggtacaggagcctgcagctagggctgagtcagggcaggcccaggggcacgggaggaatccaggggacacagcaaactggagaggggcgggaagcatgtgccctgcacctggccgggccctacttctcccttccttctcttcctcctcttcctcctcttttttttttttttttttttttgagaaggagtttcactcttgttgcccaggctggagtgcaatggcgtgatttcagctcaccgcagcctctgcctcccgggttcaagcaattctcctgcctcagtctcccgagcagctgggattacaggcacctgccaccacgcccggctaattttgtatttttagtagagacggggtttctccat[243 bp omitted]cctcagc[218 bp omitted]ttgctgtgttgcccaggctggtctcaaactcctggcctcaaggaatcctccacttcagtctcccacagcactgggatcccaggtgggaacg[133 bp omitted]ctcctgcctcagcctcccgagtagctgggactacaggcgcctgacac[182 bp omitted]ccctccatgtccggcctcccgagccccctctgcccacctccctccagctgcgctggccacctcctcgctgctgcttggacaccgttttctccctgtgacctcagggtctgtgcccaggatgtccctcggccgggagccgttcctccccactctcaggcccctttgccggtgtatcatcagtttatcgttcctcccactctcaggcccctgtttctcccccttgcgcctgtggggcttgcctggctctgtaaggggagccccgggcccagcctggccgccccacacctccagcatccatctggggcctgacacacagtaggtgctccataaatgcacaggctaagttggggggttccccatcttacaggtgaggaaactgaggctccgaagagggcggcctgacaggcatctgggagccccggcccaggcgaaggtatttcctcctggcccagggcgccgtggggtcccggggcagctggtggggccgccaaagggtggccgtgtgtgtggcggtggcagctggggctctggcagtgggggagggtgggcgggaggcagcagctggtggctggccccaggccagctggagcctgtgcagagggagggcgctgggtcggctcacgctgcctctgggtccccttctgagtccccctcagcctttctcggttggtctccatctctgtctttgtctctctgtctctgtctctttctgtctgtttctctctgtcttctttctctgtgctctctctgtgtcagcctccctgtctctgtctctttctcttccccatctctgtctgtctttttgtctctgtctctgtttctttctgtctctgcgtatctctttctgtccctctgtctctgtcagtctctctgtgtctgtgtgtgtctccatctctctctgtctccatctctctcgttgtctctctgtttctctttatctctttctgtctctctctgcctgtctctctgcctctctgtctctctgtttctctgcctgtctctctctctgcctctctgtatctctatctctctgtctctttgtctgtttctgttcttctctgtctccttctctgcttctctgtctccttctctttctgttcctatctcttgtctttttctctgtctctctctgcctctctgtctccctctgtctctgcctctctctccttccccttcacactggggactcccctgactggcccggacaggggctggttacactgctgcaccctctcttccagacctcccgctccaccccactccctgctgcctgcacccctgcgtcagccagcacctctgtgctggcatgaaggtctctacccaccgggaggagcccaggaccctctcacgggctggggaccctgtgcgcatcgctccccctgtgagcctgcatttccccacatgcagggtgtttgcagagccctctcagagcggtgctctggggaaccacagggcagaggtctcagcccgtcggggctcccagccagatggggaaggagaatttcgaaggaatcgccttacaggcatttgaaactctgcaggcagaggccaggggaatcccgggtggaggagcaggcagggtgagggccctgagagtccctccccgggttaggagcaggcagggtgagggccctgagagtccctccccgggccacccccagccacactcccccgtcacacagggaacctggcccagttgcccgtacccactggtcctggggagggcagctgggaggggctgtgtgtgcactaggggggcggagctgggactccccccaaggaccctcccttccgggatctacacccctgatcccccctcgccagcacatccacccaccaccctcgcagacaatagaattcatcactgtagaaacatcctctggggctggggcttaatcagttcctgatttgcatttttgcatattaatgacagcagagctgctaattttggcacatgattttaaaggtgcagtagctctgaaactacggaggcggtgagggggtgaggaccggggccttcctcacctggcctggggggtgctggccctcaggttacaggttacagggtctctgccctgggagcggcccctgcctctgggagctgcagggacccttggggattatggggtccctgcctctggggctcacaggaatcacagagtctctgccactctatctttctttccttcccttccctccctcccctccctcctctctctctctctctctctctctctctctctctctctctcgctctctctctctcgctctctctttcctttctttccttcccttccttccctcccttccctccctcccctctctctctttcctttctttcctttccttcccttccttccctccctcccctccctcccctctctctcctctctctcctctctctctctctctctttctttcctttctttcctttccttcctttccttccctccctcccctctctcctctctctctctctcgctctctctctctttcctttccttcctttccttccctccctcccctctctctctctctctttcctttcctttccttcctttcctccccttccttccctccctcccctctctctctctctctttcctttccttcccttccttcccttccttccctcccttccctcgcttctctctctctctctccttcccttccttcccttccctccctcccccttctctctctctctttcttttcttcccttccttccctccctcccctctctctctctttcctttccttcctttccttcccttccttccctcccttcccccccctttcctttccttcctttccttctcttccttcccttccttccctcccttccctccctcccctctctctctctctttcgttcctttccttcccttccttccctcccttccctccctcgtctctctctctctctctctctctttctttctttctttcgctcttgttgcccaagctggagtgcagtggcacaatcttggctcactgcaacctccgcctcccgggttcaagtgattctcctgcctcagcctcccgagtagctgggattacaggtgtgcgccactatgcccagctaatttttgtttgtttgttttttga[134 bp omitted]tatgcctggctaattttttgaatttttttttagtagagacggagtttcaccttgttagccaggatggtctcgaactcctgacctcaggcgatccgcctgcctcggcctcccaaagtgctgggattataggtgtgagccaccgcgcccggcccatgcccggctaactttttgtatttttagtagtttcaccatgttggcaaggctggtctcgaactcccgacctcaggagatccgcccacctcggcctcccaaaatgctgggattacaggcatgagccaccgcgcccggcccactctttttcttctcttttgaggcaggatcttgctctgttacccaagctggagtgcggtggtgcaatcatagctcactgcagcctccacctcctggctcaagtgatcctcccacctcccacgtggctcggaccacaggcgtgtaccaccacactagcctaattatttaaaattttgagtttgggtgccgtggctcacgcctgtaatcccagcacttcgggaggcagaggctggtgggtcacttgagatcaggagttggagaccagcctgaccaacataggggaaccccttctctactaaaaatacaaaaattagctgggcatggtggcacgtgcgtgtaatcccagctactcgggaggctgaggcagggagaatcgcttgaacccaggaagcagaggttgcagtgagccaagatcgctactgcactccagtctgggcgacagagtgaaactccgtctcaaaaataaataaataaatacatttttgtaggacaggggtcttgctatgtttctcaggctggtctcgaactcctgggcttaaatgagccttctgcctcagccacctaaagtgctgggattacaagtgtgagccatcacgccctgtctttgccactcttgcatttgggcatcaacgctggcattggccaggggaactgggattctggaattttctccaattggctccatcctgagaatcccatatttggaaagctgtgaattcaagttccgagtatcttaaaacctttggattttacccatcgaggctgaggatagtaagaatatttaccggccaagaatatcactttaaaaaaaaatcaaaacaaacctttgtattctctgtcctaggtagaccctaaatcctgcccttgtcctcacctcctgcgctcagatcggaaacctgggacctttgcctccaaaccccaccccacaatcccgcccaggctcaggactcagttcccttcgcccccaccgcgccctcccccggccctctgcacctgccgcgtcccgtacccggcctgctcttcttcaccattggtgccttttccttcaaccccacctccccagggaagccctcctggtgacttcaccacgcctgtgtgttcagttattctccctctccctgggaggtggggaaaccgaggcatagagcggcgaggctggtgctcacggccccccggggtcctccccagacccctcccctccctgtggtccgggggtgcatggggtggggcgcgggggcctcgctggtcctggggttcagtcgggcgcgcgtgctgccacctggtggccaatggggcaaggccgcgggtcctccccgggcgtcggggcccccaccccacggagcccaccctgcgctgggggaggtgggctcaggaaagccgcggcccccgctcgggacgccaggggtgggggacacggagcttcgccagactcccccaaactcgggcgcgtcatgggaagaatggagggagctggatgatgggggtcctgcgggctgccttccctgggtcttctggtgttgtccccgtcccgtccccttcttacccctgcgtgacgcccagaccgagggaggtgggactgggacccccttccagggacagagctgcagcgggtctggcgtccaccagggcgcgcccgcagcccagaaacccgcgggcgctccccacgtgcgcgctcacacgtgcatccgcggctaccccagtgcctcgcggctcgggctttttttaatttttattttatttttatttttttgagacggagtctcgctctgtcactcaggctggggtgcagtggcgcgatctcggctcacggcaacctccacctccctggttcaaacgattctcctgcctcagcctccagagtagctgggactacaggcacgtgccaccacgcccagctaatttttgtatttttagtagagctagggtttcaccatgttggtcaggctggtccccaactcctgaccttgtcatccgcccacctcggcctcccaaggtgctgggatgacaggcatgagccaccgcgcctggccggctcaggcattttgacccgaggcacacgtggtcctgtgtggttggtgtgtttctgaatgaacagtgttcacgtagattcaggtgtgccacacgtgatgtatacggggcatgcttatgcgtgttctcgcatgctcgtgtgcattctagcatgtgtgctcactcctatacacaggtttgcatgcgtgtgctggcatgtccgtgtgggtgcacacagaggctgtgacatgttcgctcgttgccacgagctcaggtgtgtttgtacatggtcagtcccgtttatacatgtgcacgcatgggcacgtatgtgccaggaaggttcacacatacaccttctcatgtgcggcctgctgtatctgcacatgtgtgtcctggtaaacgcgtgtgtttgcgtgttctggtgtgcttgcgcatgtttgtgtgtgtgcatgtgggcgcactcacagccacagcccatgctggcgtccctgagtgcaatggccccttatggactgggtcctacaggacacccctgagtcaggccccacataccccagggccctcccacagctccactgccccaaaccccctggccctgtgagccgatccctgcagccaaagggtccaggtcgcccccagtcagcctctccctggtctgccccaacccccagctctccactcgatctcccccacttcagtggctgcagcctcctgcacccgcaccctcttcctgctgtggtggcttctgggtccggtccccagtcagccccagctgctgcctgtgcccccaagagatgcagagctcttaggaggcagggccgtgtctggggtccacggctgcaccctgatctctggtatccagccggcacgcggtaaccaggtcagaagcctaaccgtccttcagccgggcccagcagctcccgtcgctatgggaaatccatgctcagctcccacaaacccagcagtcaccagctggcctcagccagaggttcccctgtcacagagcctgccaagcagagaccctcctgacactcactcaccccttcctctccagtggtggggctggatgagcgggccgcctccctcctctttaccgttccctctccacctggcaaactcctattcatcctgtggggccctggaacatgggccccacttctaggatacctaccccagtcctgggggtgaatggaccagaagctaccttggagagcagaccaggtgccagctcccaggctcccagccctcctgggtgaacttgggtggtggcagctgcgtctcatttccaagccaagcctgtagacaggagcccaatggcggttagtcaatggcagaccgccagggaggggtgaatgctggttcccaggctgtgtcaacatagccaaccagctgcccaggaggctctgatgtgaggaccgtacccactgctggtgcctccctccctccctccctccctctctgtctctccctcccctctgtccctccctcctttccttcatccctccctccctctgtccctctgtcactccctggccctggccacccacacagcccccaagggccatctccttggcaacagtggccacaaggtcgtctgctggatcaatctcctctcacccctgcagccccgaccccggacccggaaggtgacaaggaagtggggtcaggcctggcttcccgggagggacccagtgtgtgtaggacagggggggtcctttggctggagcaggggtggcaggactcagatagggtgagccggtccctgttgagagggtcagcagggccaaaggtccggcgagccctgggccacacactgcgtgtgaccctccctgggcctcagtttcccttgaggcacagcctctctgatgtctggactccgggtccagtccaggacagtcctttggagagcccagtgcgtgggagacacagtccctgggctgacggtgagaaaggacaacgctgccctcatcccaatttacacgccccgaagacactggcctcaggccgctgggccaggcagtggtcagggctgggga[197 bp omitted]ctgagg[139 bp omitted]agctcctgggcagtccaccactgctgcttctagaagattccaccattgccatttctggaagcttccatctttgtctctctgggcagctccgcattccagtcaccagggcagaaggaagaaggtgccctgaggtttttccctttggggaacaggtgggcaggctaggcagggagaggaccctccaagcacacgggagaagctggccccccctcctcggtggggcgctggggacacctcctcggggcggcacagcccgggtggggccaccaggcgtcccgcggcaggtcggtgagccggcccgggaggactggcatgctgaagacgtttgtatggattctggggcaggaggggcggcagggtcttggggggccagaggcgggagagggtgggatcgcctgcagaacctagctcaggctgctctcttcctttcccaagcctcagtttccccatccgggcaatgggggaagacgcagatagggaatagatttgcccttggcctccggggacctcgttttccggctgcggcactgcagctcagagaggtcaggctgcctgcctagggccacacagcctggaggtgggggccggccggggggcgcagacgcgcaaagcctgtccccacctcacggccccctccccgccggcccgggcggggctgctggccctttaagagcctcgttttggcgccgcctcggggttatcgatcgcagccttggaaacgcgattagattatcccggctgggaacggcagcctggcgggggccgcgcgggggaagcgcgccgcttcttgtaaacggttccccgaagggcgctgggccaggggcctgggagggggctcgttcccggtggggggggcgtcccggtgcggcgcggcccagcgctcccgggaacgggggatgggtaactggggcccccattttgtgttttgggtttggaaattgaggcgcagagaggggtgcgcctttctgcgaggccgcatacccaggaagacgggtttatttgttcagctgcatttattgagcgcctagtgtgtgccgcgcatgcgcggggcctattaatccgattagcgtttcgcataaaaatagagtcgcggatgatgatgatggtgataatgaatatccgtgctcctgactcgctcctgccgtgccaccaagcctttatgtgcgttgtctcagatcctcaccccaacacttagagtggcagaggccctggtcccattatacagatggggaaactgaggccggagctcaaacaagccagaggggccgaaccgggacaggcgggcccccggctcgctcctgggagcctccctagtagggtcaccgtagaaggaagggaagggatgggttgtggggggagttggggaccagcccctccatccactgtgaccccttctgcatccgccaaggcctctggtaggtgcctgagctgaagcagatgaacccttgagtgtgggaggaaaggatgggccagcggatgggtgggggcaggaggaggcccttccaccaccaacttctgacgcctcagcagaaaggccccgggcccatgagcttgagtcgggggctggtgggcagtggacaggaccagcttcccttccactccgcggtcgtttgctcccacatgtgaccccatgcccacggggggctggagggtgggcaagcacgcattcgttgaacacctgctgtgtgccaggccctgaaccgtccccctgccaattgtggcacagtaggagctggttccaatgcccacccacattcaccctgatgcacccccagagacccagtccagtggtcccacagtcaacgtttgttgattgaccaaatgacagtattttgcaatagcagtaaatacaaaccacttagactggacttcacttgggtctcaatgacccttcctgccccatcgtccctgaaaacctctatccttccatcgttcctaacattatggagcaccgactgtatgccccaactaccttcttcatcctctcagcagcctgtgaggcaggaaatatgactggcctagtctacagagggggaaactgaggatctggggggtggagggccttgtctgaggccgcagagcccagaagatgagattgtaaacccagacccaactgtgtctttttttttttttttctcagacagagtcttggtctgttgcccaggctggagtgcagtggcatgatctcagctctctgcaacctccatctcctgggttcaagcgattctcctgcctcagcctcctgagtagctgggactacaggcacccgcctccacacccggctagtttttgtatttttagtagagagggggggtttcaccatgttggccaggcttgtctcgaactcctgacctcaggtgatctgcccgcctcagcctcccaaagtgctgggatgacaggtgtgagccacccctcccagccaggcccatctgtgtctgaaccttaggttgtttcctaggaaaggggccggggcttgtacttctgaggctctgaatgggaggaaaccgaggcacagagctttcatgaggagacaggaggccaagactcaccctccaggttgcaggcagaaggaggggatgtggctggcttgagctacaaccacacggtaccacctgggacctcttcagtagggaccagctgggcgaggaccccgccatggtggggaggacaggagaggagggagctcaggagaggaatgtcagggaggtcacacttaggggtcgaggcaggtgattccttctgctggagagggttgccagggtgtctcagcctctgggcagggccagagcagggatggggggcccacccgtgtccccccagagtctcccctgcagccccccaatgccggacatccagaagggcgagcctgtgtctctctcctctgtctctctccttctctctctcttcatctctctttttccatctctgccactgtctccctctctatctctctctttccttctctccatctccatctctttctgtctctctccatgtctctgtctcttactctttcttaatctttgcctctttctctccatcactgtctccatctctgtctctctctgtctctattccatctctgccactgtctctccctctctccctttttgtctctctccatcttcatctctctccatctctgtctctctgtctctctctctctccctttgtgtctctctctccatcttcacctctctccatctctgtctctctgtctctctctctctccctttgtgtctctctctccatcttcacctctctccatctctgtctctctgtgtctctctcttccatctctgccactgtctctgtctccctctccctttgtgtctctctctttccatcttttctgtctccctatctccatgtctctgtctcttactctttcttcatctctatctcttcgaccctctctcctcgtcccccagtccctctctctgtctctgtctctctctttgtctctccatctctctccatgctcctatctctgtctctggccctctcctccccctgactccggagccacatctctccccttcccagctccctggccccctccccacccgcctcaggagccctcagctgtggtctctccaagtgcccccactcctgccgggaagggcctcatggggccctggtgggccttggtgctggacaggtagagacttgagaagctcctgggtgccccagctccaccctgtcccctgacccgagcaggccgcatggccttggccagccgctgccctctctgagccctgccctgcccttgaaatctgggagggtcggtgtctggcttggtccccccagcctaggacttcataaaagcccagcacccatcgaaggtggacaccctagagctgggagaagagaataaatgagccaaccaggaccagcccctcaggcctcacctcacttctgccagatccccgcagagaccccccatcttctggggaaactgaggcacaggcagggtacaggtgccggaggagggctaaaggcggctaaaggctcccgcgcccgggcgtccctctcgttgtctgcagggtgtggagatgcctcaggccaggggctggggctgggaccacctcccccatggcatccccccaggtgctcccatgctggttcctggccctctttccagccttgatgaaggcaggcgcaggaaggggctcggcctgcacgtccctgccaggagcatcgtcatgagcgtgaagggggcaggcgcctggtcagggtcacttcccgctggacagatggggaaactgaggccggggtctgtaggaggctttggtcctatccactcctcaacgcacttccctaaagccaactccatgcccgacccagcagtgatccggccaggtcctgtcctgccctccca[132 bp omitted]aaaccccatctctactgaaaatacaaaaaattagccgggcgtggtggcgggtgcctgtagtcccagctactcaggaggctgaggcagaatggtgtgaacccaggaggtggagcttgcagtgagccgagatcatgccagtgcaccccaaaaaaaaaggaggtgcattcaacaaaaggacccctaaatacagcagtatagcccagggtggggccggcaggcagagaagcgaccccccggggcagctgccaagggcccaacacgggctggggtcagggagggcttcctggaggaggggacacttgagctgtggcctgaggtgagcaggagctcagagagtagacagcacttctggtacaggaaggaggaggacagcgccctgaggccggaaccaggctgtggggaagcaagaccggacactggagctggaggctgggccatgcagggtcccgtgggctgcgttgaggacgtgggtctttttctggggtgcactgggagccacaggaggctgttgtgaacagagtcatgtttccttgtttctttttcccttcttttttttttttttagagataggattttgcaaattagccgggcatggtggcgcgtgcctgtaagcccagctactaaggaggctgaggcaggagaatcacttcaacctgggaagtggaggttgcagtgagccgagatcacgccgttgcactccagcctgggcaacagagaaagactcagtctaaaaaaaatttaaaaaaaaaaaaaaaaaagagagagagagatggggtcttcctatgttgcccagactggtcttgaactcctggactcaagtgatcctcccgtcttggcctcccaaagctctgggcactcttgtcacccaggctggagtgcaatggtgcagccttggctcactacatcctctgcctcccaggttcaagcagttctcctgcctcagcctcttgagtagctaggattacaggcatgcgccaccacgcctggctaatttttgtatctttagtagagatgggggtttcaccatgttggtcaggctggtctcgaactcctgacctcaggtgatcctcctgcctcagcctcccaaagtgctgggagtacaggcgtgagccaccgcacccgggcctaaagtcatgttttttaagccaccagccctggtggcttccagggaagggctgttggaggcagatggggaggctggaaggctgggttgaggctgagtcaagtccacgcagatggtctctgccaggcgactgtgtcagagatggagagacagggagagacaggcaaggtttgccttcctgcccagcttctgtgacccagggggcagctggacggctgggcaggggtctggggaccaaggggtgcagggcagtggccgtggccctgccggcccctccacagcagtaattaagggctcccggcgtccccgcggcgtgatgtatgtgtaccttaactaatcatttattaggtcactgatggttcgtcaatattaattcatttatttaaacaactcagctctgtaatgaagatgttgtctgagaggggaggctagttggtggcggggccaggatgcagaaagggggctcagatttgggtcttagggtggcctcaagaaatgtcagctgggcacggtggcacatgcctgtaatcccagcactttgggaggttgaggcgggaggaggacttgagcctaggagtttgagaacagtctgtgcaacattgagaccacatctctacaaaaaaaaaaaaagaaaaatttaaatacaggccaggcgcagtggcttactcctataatcccagcactttgggaggccgaggcgtgtggatcacatgaagccaggagttcaagaccagcctggtcaacatggtgaaaccccatctctactaaaaatacaaaaattagccaggtgtggttggcgtgcacctgtaatcccagctactcgggaggcggaggcaggagaatcacttgaacccaggaggcggaggttgcagcgagctgagatcacaccactgcactccagcctgggtgatagagcgagactctgtctcaaaaattaaaaaaaatatataaaataaattaaaaatacaaaaattttttttagctgggtgtggtagtgtgtgcctgtagtcccagctactggggaggctgagatggaaggatcacttgagcgtggaggttgaggctgcagtgagctatgattgcaccactgcactccagc[132 bp omitted]cgaaaccccatctctactaaaaatacaaaaaattagctgggcagggtggtgggctacttgggaggctgaggcaggagaattgcttgaaccagggaggcggaggttgcagtgagctgagatcgtgccactgcactccagcctgggcaacagagtgggactctgtctaaaaaataaaataaaataaaataaaataaaataataattaaataatcagatgacacccctaccctgctcaagaatagtccatggctccccagtgccctgaggagaaaacccacactcatccgaccctgggtgacctttgcggctccgtcttcactcactctccactcactgtctccctttgcccattgctactgctggaaacttcccagctccttcccgccacatggactctgcccttgctgtgccctcgcctgggagccgccgtcccgcatctcctcccggctccttcactccctggggtctcagcgtcagtgtcatctcccagaagcaccttctccaatctccccagtcccagggcccccagcacctccccgtcacccatgatcctgtttgatttccctccgagatcttcttggtgatgtacgggtttagctgtttatcgtctgtttttcctccatcttcaccttggtctgtcccagagagtagatggcactcagctgctgctgcccctccacagcagacatttctggggccccgtattttggctccttggcccccgttgctggttccctgcaggcgctgggtgcctcctccgggtctccgggttttttgtttcgtgtttgttttgagacggagtctcgctctgtcacccaggctggagtgcagtggcgcgatcttggctcactgtaagctccgcctcccgggttcacaccattctcctgcctcagcctcctgagtagctgggattacaggcacctgccaccactcctggctacttttttgtattttttg[134 bp omitted]ggttccaccatgttggccaggccggtctcgagctcctgacctcaggtgatctgcctgccttggcctcccgaagtgctgggagccaccacacctggccactgccaattttatagatgaggaaacagaggggcagcagttagcaggcttgcccagcaggca[134 bp omitted]tactaaaacacaaaaattagccaggagggatggtgcacacctgtaatcccagctactcgggaggctgaggcaggagaatcacttgaacccgggaggcagaggttgcagtgagctgagatcacaccactgcactccagcctgggcaacagagtgagactctgtctcaataataataataatagtagtaatattaataataaggctgggtgtggtggctcgcacttgtaatcccagcagtttggggggctgaggaaggaggatcgcttgagcccaggagttcgagaccagcctggacaacacagggaaaccccttgtctctacaaacaatacaacaaattagccgggcatgcatctgaactcccagctactctgaggcggaaggatcgcctgaacctgggagattgagggtgcagtgagctaagattgcaccactgcactccagcctgggccaccagagtgagaccctgtctcaaaataataacgataatggtaaaaacccttactacacggctgtcatgcgaactgtgtcagctgttcgttcattcattcattcattcattcactcggacacccaggtgtctgaatctctttgtgctcagaccccaccctggaggatttggagcctgagtgggtgcatcccgggcatggtctggacagagctggacaccggcattcccggctctgtgcagtcagggtgggatcagagggagagacctgagattggggaataggggcagaggggctgagggctgggcctgggggggatgggagggctgcagggagtggggcttggaggatgagtgggggacatcggctaagggaagcaggaagggacccctggcagagaccggcacgtgcaaaggctcggagatgtgaaggggcagccctagagactcctccgggctggagtgcagcggtgccgtctcagctcactgcagcctccacctcccggactcagcctcccgagtagctggaactacaggtgccaccatagcagggcaatatcttaacttttttgtggagatggggtctcaccatgttgcccaggctggacttgagctcctggcctcaagtgatagtcccgcctcggtctcccaaagttccagttagggattctgatctggggagggcactggggagccacgcagggtctcaagcagggggagggatgtgtcccaactggccttcaagagtgatcgctgcactctgagtacaagtgggagcattcgaagttccattagcaagctccggtttggcaagcatggattgagcacctactgtgtgcccgtctttggcctcagccttagaggccagatcacacgaaggcttgtgggcacgcagttgggggccagccccacaggcgagtccaggctttcaaatcaggaatccccctgccctgtctgcactggtggaaactgctgaagccgtcaggagctgggagccggctcttggtggcttgatagtgtgcgatgggccagtgtaggctccatcccaggctggacaccggtcagtccccagaggaagtatcgccgagtctgggggtggccctggcgcacgtgcagaacctctcagccactctgatggtgcttaaggcaggcggtcagggtattcaagttaacttcctcttaaacagacttaattagtgttctccagtcccacataaattaatcgtggccggccacggaggctgaaacacccgatcgatggggtggctcggcgacggccaggaattctccgtctcatccgtcaccacagcaccggctgataacggctcacggctttatcttctccaacctggcatgaccagccgggggaaggcggccagaggggtctgggggggtgctggctgctctctgagcctcagtttccacttctacaggatgggatcgtgctcccacaatagcagattggcaaaggggctggaaaacagctaataataacaacttggccaggcgcagtggctcacacctgtaattccagcactatgggaggctgaagtgggagaatctcttgagcccaggagttggagaccagcctgggcaacagagcaaaac[132 bp omitted]aaccctgtctctactaaaaatacaaaaattagccgggtgtggtggtgcatgcctgtaatctcagctactcaggaggctgaggcaggagaatcgcttgaaccagggaggcagaggttgcagtgaaccaagatcacgccattgcacttcaacctgggtgacagagtgagactccatctaaaagtaaataaataaataaaaaccaaaaaatatttacccaaacatggtggtacgtgcctgtagtcccagctacccaggagtctaaggtgggaagatcacttgaggccaggagtttgagaccagcctggacaacatagcaagaccccacctctacaaaaaaattaaaaaataattagcagaatttggtggtgcatgcctgtagtcccagctactctggaggctgaggttggaggactgcttgagcccaggagatagtgactgcagtgagccgtgatcgcaccactgcactacagcctgggcgacagagtgagactgtctctcaaaaacaaaacaaacaaacaagaaaaatagtgtaacaaccaccgcatagggtcatgtggctgaccccagtgctaagcatcatctaatttattttaactaattaattaatgatttatttatttgagacgagtttcactgttgttgcccaggctggagtgcaatggagccatctcagcttagaacaacctccgcctcccgggttcaagcaatgctcctgcctcaacctcctgagtagctgcaactacaggcatgagccaccacgcccagctaatttttatattttttggtagagacgaggtttcaccatgttgtccaggctggtctccaactcttggccttaagtgatccgtccacctcggcctcccagagtgctgggattccaggcgggagccaccgcgcctggccagtatcatttcctttaatccccacaagaggcctgcagggccctccattcttctctccttttccagcgttgagtgacccctgtgaggtcccaccaccggcaaatggctttgtctggatttgaatccagtgaggagccccagaacctcagcctcaagggtctgggattttgtggataagggctgcagtggtagagactgcatagctgctatatctcacccggcacgcaggagcggctgaggccaccctagaaggctctgcaccccagtcttcaggcatccatggatttgaaggcggggctaggggggattccaggaggtgccgggtgcaggcagttcacgggggacccctccggatgagcccagccaggctgatgttcgtgcccctggggtctggaggtcctccctccgagtgggaccgaaacctacattcgagactgtctatacaaaggtattgcgaatccctgctgcacaccaacccctgggctgggggcttcgggggctgtgggcacggtcgtcatcacagtggacatgacctcttttcatggaagagaaaaaccaatgaatgtccaatgagaaaaccacggagggggccgggcgcggtggctcatgcctgtaatcccagcactttggaaggccgaggtgggtggatcacctgaggtcaggaattcgagaccagcctgcccaacatttttggtagagtagtaccctgtctctactaaaatacaaaaaattagccgggcgtggtcatgggcgccagtaatcccagctacttgggaggctgaggcaggagaatcgcttgaacctgggaggcagaggttgcagtgagccgagatcgcaccactgcactccagcctgggtgacaagagcaaaacttcgtcacacacacacacacacacacacacacacacacacacacacacacaagaaaaccacggaggggtcagagagggcttcctggaggagggggcgtaagacctggaggaagaagggccaagagggaggggtggccaagggcctatcattgtccccaagaggagaagaagagtggggttgctatgaagcagttctagaaaacctatgatcagggattatgcctgtaatcctagcactttgtgaggccg[134 bp omitted]gaggcaggagaatcgcttgaacccgggaggctgaggttgcagtgagctgagattgtgccacggcactccagcatgggcgacagagccagactctgtctcaaaaaacacaaacaaaacaagagaaaacatgtgatcagaaaagcccccaaacctggagccactccggagctgggggagccgaatgggtgggatggatagggcgtggccgcatcggagggcgactgacgagggggcggggccaagtgagtgaggcttttgtggaggggcggggccaaacgcgctaactgcatgtggacgtcgtctataggggccggctttcccagggggcgtggcctgcgtgcgacagggccaaggtggggcccaggcaggttctcccctctttgaggaccaggcctaaagcagcaaagacccatccacccaaggagttgttgagaccccgtagacctttgctaggtgtggatgacctccagccctgtgggaccagaatggggtgggagagggagacccggagctgaggaggacccggagggtacctcggaagctctgcctgggatcggggagggctcctgaaggaggcggctttgaggatacagaggacagccagctgacaagacagagagggtgcatgtgcaaaggccttgagacaccagcagagtaaaagccagtttgcctggagcagggtgcatggtgcgtggaagagcctgggagaccaggtggagacggggacagggcggggatttgtgctttccggagaagtggagaagccatgggggcttctggcaggtggagatgggcaacgatgcagttcgtataaaaatataaaaattagggcagggtgcggtggctcacacctataattccgcactttgggaggccgaggcaggtggatcgcctgaggtcaggggtttgagaccagcctggccaacatggtgaaactccagactttgaaaagtcccttctggccgggcgcggtggctcacgcctgtaatctcagtactttgggaggctgaggcaggtggatcaactgaggtcaggggtttgagacccacctggccaacatggtgaaaccctgtctctactaaaaatacaaaaaattagccaggcgaggtggcaggtgcctgtaatcccagctactcgggagggtgaggcaggagaatcgcttgaagccgggaggcagatgttgcagtgagccgagatcacgccattgcactccagcctgggcgacagagccagactctgtctcaaaaaaaaaaaaaaaagtcatttcttggactacctggagggcaggaggggagacaaaaggaggtctgggagcaacgtccaggctgggggcaaggggtgctgaggactgcggagggctgcagaggtggggagaagtcgctagattagaaacagatttttttttttttttgagacagggtctcactctgtctcccaggctggagtgcagtggctcaaacacagctcactgtgccagcctcggcctcctgggcccaagtgatcctcccacctcagcctccagaggagctgggaccacaggtgcacaccgccaggtctgatttttttttttttttttaaggcagagcctcattctgtcacccaagctggagtgcgatggcgcgatctcggctcactgcaacctctgcctcccgggttcaagcgattctcctgcctcagcctcctgagtagttgggattacaggcatgcaccaccatgcccggctattttttttttttttagacggagtctggctctgtcaccaggctggagtgcaatggcatgatctcggctaactgcgacctctgtctccagggttcaagcgattctcctgcctcagcctcccaagtagctgggactacaggcatatgccaccatgcccagctaattttttgtatctttagtagagacggggtttcaccatgttggccaggctggtcttgaactcctgaccttgtgatccacctgcctcagcctcccaaagtgttggtactacatggtgagccaccatgcccagcctaatttttgtatttttagtagagtagagactgggtttctttttttttttttttttttgagacaaagtctcactctgtcgcccaggctgaaatgcagtggcgcgatctcggctcactacaagctccacctcccaggttcacgccattctcctgtctcagcctccggagtagctgggactacaggcgcccaccatca[187 bp omitted]tgacctcatgatcagcccgactcggtctcctaaagtgttgggattacaggtgtgagccaccgcgcccggcctgattttttattttttgttagagacgggggtctctctgtgttgctcaggctgatctcaaccccctggcctcaagcgatcctcccacctcagcctcccaacgtgctgggattacaggcgtgagccactgcgcccgacagacagttggcatttctttctggagccgcctggtaggaaggaggaggttggcagtttgaggacaattttgcatgagtttggaaattggtggtctgggggaggctgaggccggattccctgtaagccttctagaggcagccggacccgagttcagaccctctgtgggccttgggcaagctgcttggcttctcagagcctcagtttccccatctgtgagacaggtgatttgcagcgagggtgaaatgaggtggagttccaaagcagcaagtcagaggctgggtggcaagaacgaaatatactccgtgtcaaaggaaccactgctgcagtccacacccccgccctgctagaccctcagctcctgcagggagaggccggctgactgcgttctgtgtcgcttctccagagcctggatgtggaagggagggagggaggtcgcaaatgtccccttccctctaggggacctggcgtcacgccccatgagaaagccggccacagcaggccacgcccaaacacaggccacgcccacacaaggcagcgcccctccaccaaagccacgcccacctgccccgcccctcgtcagttgcctccacatgaggccacgccgcacccactcggttcccctctctgaactcatgggaatgacccaagcaggtcttgtctttgcgcctcagtttctccaacacggaagtggccacagctgatttccgtgcctctgtctgagctgggaaacgaccctcaccggcttggaggaagccttggtccccagcccggcccccatctccgcgccggcttgcactccccagggacggggagctcaccccctcccagagccctggagtggaggtttgatgcctgtcaggctggggcccggggatgggtctgggggaggcacttctgagaaaaggtggaaacggttctcagaaaccccgaaaccctgagggactcttttccttctcagaaatgctccccccgccccagactcgggaaaacgcctgttcgagaaagctgggctggctgtgggcaagaggcttggaccggcccctgtggagcccctgctccaggctgctgggaatgtcccccttctccagctgtgacctccaccccaggcaagtgtttcctgccacctgcctgtccccaaggggtccccatgttccccgcctgctgccgtccacctgccgtgtcctctgtccctccccacacggggcagggggccactgtgacctgaagcccgtcctccccaccagcttggccatgctagacacaggggcctccccagagtgtatcctccccaaaacagcccaggaacacaccacaccccacccccgaatttgcagccctggggcgggctgtggactcaccagctgatggcggcccctgacggtggtctcagccagggccctgccgggaagagagagactcatcctcagtcaggtgttaatccacctgtgcccctcacttgtcccaggtgcccatgagaaggaagggggccgtgggcagctgatggccaaaatgcaggggagccccagtgtcagggagggacacagcacctgccccgaaaatccaggcagtccttccggaaggagccggagcctctgtgtgtggagacgggtgggaggtccccagcctggcgcccggctgcccctgtgcctagggtgtcctagttcagaggtccccactgtccccgctttggggtctcccatagggtaacccccccatgaaggccctgcaaccctctcccctcccctggtgtgtcccccctccttctgaaatcactaatgggttacctcctctagcctcca[139 bp omitted]tatgctgaaaccccatctctgctaaaaatacaaaattttgagacgggggtctcactctgtcgcccacgctggagtgcaatggcacgatctcggctcactgcaacctccgcgtcccgggttcaagagattctcctgcctcagcctcctaagtagctgagattacaggcatgtgccaccatacccggctaatttggcatttttagcagagatggggtttcagcatgttttccaggcttgtctcaaacttctgaattcagacgatccgcccacctcggtctccaaagtgctggtattacaggtgtgagccactgcacctggtcagaatgccttattggaagaatcaatcttctttctttctttctttctttctttctttctttctttctttctttctttctttctttctttcttttttttttgggttggagtctcgctcttgtcgcccaggctggagtgcagtggcacgatctcagctcactgcaacttctgcctcccaggttcaagcaattctcctggctcggcctcctgagtagctgggattacaggcacccactgtcacaccctactaatttttgtatttttagtagagatggggtttcaccgcgttggccaggctggtctggaactcctgacctcaaatgatcctctcgccttggacttccaaagtgctgggataacaggcgtgagccaccgcgcccggcaagaagaatcaattttcagaatgtgggtgtgtcagacagatgcaagcagagtcctgtcctccaggtgggggtgcaggctgggtgcctgccctgcagctgctgtaataaatgacctcaaatttattggctcgaaacttcacagatttatgctttcatggttcaggagataagaaatcctaaaatcaaggcatgggcagggctggtccctcctggaggctccaggggagaacccatttcctgcctttcccagggtctagaggcgtccgcatccctcatcttagggccctttctcccccttcacagccacagtgctgccttttccagtctctctctgactccccaggctggggtgcagtggcaccatctcagctcactgcaacctctgcctcccaggttcaagcgattctcctggctcagcctcctgagtagctgggattacaggcacctgccaccacgcccagctaattttgtatttttagtagagacggggttacaccatgttggccaggctggtctcgaactcctgacctcaagtgatccacccaccttggcttcccaaagtgctgggatcacaagcatgagccactgctcctggccctcccgccgcctcttaaaagaaccctgtgaggacattgggcatcccccagataatccagtatgatctcctatccaaggtccttcatttagtcccatctgcagagtccctttagggatgtaaagtgacctatccataggtttcagggattaggattcgggggtgcacatctgtggggggccactattcagctcgcccagaggacacttccctacacaactcccccattcctgaccctaccttggagctgggagatgttcacagcctctgaggctgccaggaacactgcaaacccccagagattagatgatctccaacatattccaacgatttacttggcaagcatttgttaagtgcctgctgtctaccaggcccatctggctggtccggcttcatggatgtgtagcccagtggttcagggtttcatgtttggcttaatgctctggtgtctgtcaccatcttgatgcttttgctaatttgatctttgaacttgtgtgtgtgtgtgtgtgtgtgtgtgtgtgtgtgtgtgtttgtttgtttttaatgcagtctcgctctgtcacccaggctggagtgcagtggtgtgatctcagcttactgtaatctttgcctcccaggttcaagtgattcttctgcctcagcctcctaagtagctgggattacaggtgtgagccaccacacccggctaatttttttgtatttttagtagagatggggtttcaccacattggccaggctggcctcaaactcctgacctcgtgatctacccaccttggccacgcccagcctgaacttgtgttttataagtgaagtccagtggaacagtggagcgagcctgtgagcaagggaggtcctgaaaacgtgtgtgcttagctattccatgttggtctgtttgcacctagtggtcactatgcccaggggcacagagatccaggatcccacagctcatgagagttcagcgagacccaaaacgagtaccaggtgagtgtgtgagagagttggtagaataggcgtgcacgaagaggtaaaataaaggctgggcatggtggctcatacctgtaatcccagcgctttgggaggccaaggtgggaggattgcttgagcccaggagctcaagactagcctggaaaacatagcaagaccccatctctaaaaaacaaaaaaatgaacaaacaataagccgagcatggtggtacatgcctccagtcccagctactctgaaggctgatgctggagggttgcttgagcccaggaggttgaggtggcagtgagctgtgattgcaccactgcattcccaccttggcaacagagtgagatcccatctccaaaaaaaagaaaagaaaaggaaagaaaaagtgaaataaaaacaggttaattttgttcagtgtttcagttgttcccatcagaaccaaacacatatgctcatgcaatctccaaaacacaaatggcctaatttaggtgattctgtagacaagtcacatgttcttaaagaaccatagccaatatttccagaccaaatgatgaaattctttcaatagttgtatttaaacctggcattacatagcataaagatgaatggtcaaattcacaataataaattaaattttaaaaattttaggcttaaaaaaatttaaaagttttttaaaatttaaaaattaaaaaaattttaggtggttcacgcctttgggatcccagcactttgggaattcgaggtgagaggatcatgcgagcccaggagtttgagaccttcctggctaacacagtgagaccccatctctacaaaacaatgaaaacatcagtcaagtgtggtggatatggcttggctgtgtccccacccaaatctcatcttgcattgtagctcccacaattcccacgtgtcgtgggaggaaccctgtgggaggtgattgaattatgggggcgggtcttttctgcgctgttctcgtgatagtaaatgagtctcgcgagatctgatggtttaaaaacgggcgtttccctgcacaagctctctctgcctgctgccatccatgtaaggcatgacttgctcctccttgccttccaccatgattgtgaggcctcctcagacgtgtggaagtgtgagtccattaaacctcttttttttttcttttcttttcttttattgaggtggagtctcgctctgtcacccaggctgcagtgcagtggcgtaatcttggcttactgtaacctctacctcctgggttcacaccattctcctgcctcagcctcctgagtagctgggactacaggtgcacaccaccaggcccagctaattttttgtatttttagtagagatggggtttcacca[136 bp omitted]tatcagcagcatgaaaacaggctaatacagtggtggtgcatgcctgtggtgccagctacttgggaggctgagatgggaggatcacttgagcccaggaagtcaaggcctcagcaagctgtgattgcaccactgcactccagcctgggcgaaagtgagactctgtctaaaaaatatgtaaaataaactgtagaatgatgtggaatagcaaattgaagaaaactatgacaagttgagagagactgtagaagaaagaaaaaagctttaatgttagcactttgaatgatacttttttcttacttttttttttctttctttttctgagacagtctcactctgtcactcaggctggagtgcagtggtgcgatctcagctcgctgcaacctctgcctcccgggttcaagtgattctcctgcctcagcctcccaagtagctgggactacaggtgcgtgcaaccatgcccggctaatttttgtaattttagtagagatgaagtttcaccacgttagtcaggctggatggtcttgaactcctaacctggggtgatctaccagccttggcctcccaaagtacaggcatgagccacagcacctggccagtctgtctttataaataaagctttattgacacacagccacagccactcacttatatattgtctgtggtggttttactgccactgcagagctgagcagtcctgacagagactgtccaattcaaaaagccaaaaacattggctacctggtcccttatagaaagtttgcagagggccggg[175 bp omitted]gaggcaggagaatggcgtgaacccgggaggcggagctcgcagtgagctgagatcgcgccactgcactccagcctgggtgagagagtgagactccatctcaaaaaaaaaaaaaaaaaaagaaagaaagaaagaaagtttgcagagcctggtctcgagggtggagtccagaggtgaggctgggagaaggtgagggctgctggaacatggcagagcgggcgtattccagggagacttgggtgagactcgaggatgctggagaaggtaaccatcggggtggggtgcgaaggagggcagcaactctcctgggagatgggatggatggtggggccgtgggtgagatggggtcatgcagagaggacagaccaaggccccagtggaccctgggggaccctgtggctgtcttcagagcagcccccgaggtatcagtgctcacagcaacttgcggatacagcctagaaggccccatgcctcaaaaattcttagagtctgaggagctcaagaggctcacatcagcttcgggaagctctgtagggcggccaccaagctggactgagggatgggcgg[134 bp omitted]accaccccccacccccgccaacttatacaaaaatttcaaaaattcaggccggcacggtgctcatgccggtaatcccagcactttgggaggttgaggttggtggatcacctgaggtcaggagttcaagaccagcctgaccaacatggtaaaaccttgtctctactaaagatacaaaattagctgggcctgatagctcatgcctgtaatctcagctgcttgggaggctgaagcaagagaatcgcttccacccagcagatggaggttgcagtgagccgagatcgtgtcattgcactccagcctgggcaacaagagtgaaactccgtctcaaaaaacaaaacaaagcaaacaaaaaaattcaaaaattagccgagtgtggtgatgcacacctgtagtcccaactactttggaggctgaggtgggaggatcgtttgagtccaggaggttgaggctgcagtcagctatgattgcgccaccgcactccagcctgggtgacagagcgagaccctgtctcaagaaataagaagagaaggaagttggtggaggacattccacgccaaggagcccatgagccccggctggtggtgcacgtggagcatttgaagtcaccaccagtgacccggcccaggtgcctctgcagtgggacgggaggccggctttggtccagctcagacagagcttcagatgcccatcaagggatggggggctttgttgggaaccccatggtgccccctgggcctgcacatgtcgccccagtcccaaatatgctcccacctctggggccaggccactgaacgcccttcaggacactgtccaggggccagagtcaccatctgctgacccggcacccaaatcttccgcctcagaccctcctggccctccggttctccctctggctggccctcagccctccctggcacggaccacgtcttccgaggatgccccggaagatgcaccgtggataaggccatgcgatcaataggtccatcggccgccgggggggcggaagcgcggctcatcagggcgcctgctgtcccctccccaccctccaggaaggcggataaggcccggggaccctcttaagggacgcctggcacccgcccgccgcccggcactcctatctcccatggaaggacccagttcctgaattgccccatgggccgcgccgcaggcctgcaccgaagctcttaatagcctgggcctaatgttttattgttggttttaaaagtgtaattagttcaagtgtaaacagaaaaaacctgcttaattaagaatttttaaacaggggcataaagcgggagcgggagcattgacgaaccccaagctgcttcataacatcgatcggaagaggctccgagtggagggccgggcggggcgggcgccgcgggggcctgggagcctcccctggatgccatttgccgcccgggtgagggccccggggacctgctggtttacgatcggggtctcgggaccggtgcctaatgatttttatgcattaatggagatgacagttggccaagcaggctgtttaagaagcctttatggggggctgggagcccagtcctgtgaccctgggctgtctcgggggtgagaacccccgctgggagggaggccctggcgctcccaccctcctggggccggcttgctgggcggggtccgggtgttgccccctctccaagtggcacccaccgagggagtctcagcatcaccgtgtcacctcccggccgatccggcctgtctcggagtcaggacttgaatttccttcgaactgcaaggggctctgccttctacagagccggggcggggcggccctgacagtggggctgggggcgtgggctgtgccatgtgcctggcatggggcctcatgccggaatgaaccagagcccagggtatgctcagcctggccccggccgctggggaggggagggtggggccctgacccttcaccaggaggtggggaagaccccaggcggggcttaggggcaccctgggtttggagatttggctgctctaaacgtagagagcctggtggcccttggcacccatgaccctggagagcaaggcctgggggtcttggggggccacaggcgagcccaggcaggggctctgctccagcctcagtgccctggtctgtggcaggtctgggggttcctgcccttgtgagcccccaaggatgcatacacggaggggggctcagaaggcaccagcacgtggaagctggtggggtcctgctctccgcctgagcctcacagagccggggggttgctggtcccggtcacttcccacccccataccgacccctatgtggagatgggggacaggagctggcctggactttggtccttgccttccaggaggagcccaggctctggagttactgtgaccgcctcccttgtggccgagacgcggccccatttgacaggcgtggccaccaaggctggcccaggccccatggggacccaggtgtcggatccgactgtgcccggcttcaaggctccagcctggacctggcagggagccagagagggcccaggcttgaggccccagatggatgctctgtttccagaacaaagaggtgtcaagacccactgtgtgctgggggtcccacccccggccctggaacctggggcaggaaggatactccatgcacacctttcagggggtcagaggctgagacggtgcctggggcagacccgtgggttggggtgggggtgcccagatcttgacccccatccgtattcccaaggggcagagatgggacgtgactcctcctggcccccgccgccggcccgcaggtgttggggtctctgggctgggtctcccggcgttgtggctgctgccgagggagatgaggccaccctgatccccgcctgctccagccgcagcaaccaaggacgatcgatagccgaggcggccgctggggcttctctcctcttgctgtggggtgggggctgggtgcggggcagccagaactggggccagaggtgcagacgggcgggagcatctgcagcccaccggtgtccctggctcctgcgcgctctccgtctctctctatctctccgtgtctctctatgtctctgtgggtctctgtctctccctcttagtttccatttcttctgcctctgtctctgtgtctttttgtctctctgtctctctgtttctgcctctctctgattgtgtctcttcctatctctctatctctgtctttgactctctgtctctctctgcctctatctctgtttctgtctctctgtgtctctctctgtctctatctcttctctatttcactctctgcctctctctgtctgtgtctctgtctttttctgtctctttctctgtctctctgtgtctctctctgcctctatctttctctctgtctctgtgtctgtctctgtctctctgtctctgcctctctctctctctgtctctatctcattctctgtctctctgtctccctctctcctcctccctctctctctttgctcccccctctccatcacagaacccaaagcaggacctgagatctcccccagaaggtgccctggggagcccccatcacagctgaggacgggcagactcaggatcacccccgtggctcctggcccccgcccggccctggccgagtctcctgtccacccagcctttgttcaagtttgaaccttccccacacatcagaggcttcagatttccccggagaatccgatttgggccactccgacgctgcagctgcgtctgtattccgggcgggtcccggccccacagacttcccgccatggcccacttcctggcacgggttggttggcccctcaccggctgtgaggtggggtccctcgccagtgggcagatgaaagcagtctcccctcctttccccagccccccggccggaatccacagcctcaggtggtggaaagagcactgtgcggggggagtcacaccctcccaggttggagtgtccctcacagtgggaccctggagcctcagggctctcgtctgcaaagtgggggtgagtttgaggaaacaacaccatttcctggagacaggcaagggccccttaacggccaagacacttgcagtacaagaactaggaaactgggctgggcacggtcgctcacacctgtcatcccggcgctttgggaggcctaggtgggtggatcacc[133 bp omitted]gaggcaggagaatcgcttgaacccgggagatggaggttgcagtgagccgagaccacaccactgcaccccagcctgggcaacacagcgagactccatctcaaaaaaaaaaaaaaaacagaaaacaaacaaaataactaggaaactgtacttaaatggcaagaacaattgagtgaaggtggggtggaaattcaaatccagctgcagtatcagtattttccaaaatgtctacaattttcacttgttaccttgggcgaggcacagtggctcttgtctataaacccagctactcaggaggttgaagcgggaggatcgcttgagcctggaggttgaggctgcagtgagctgagatcacaccaccgcattccagtctgggcgacagacggaaaccctgtatctaaagagaagagaagagaagagaagagaagagaagagaagagaagagaagagaagagaagagaagaagaggaagagaagagaagagaagagaagagaagagaagagaagagaagagaagagaagagaagagaagagaaaagagaagagaagagaagaagacaccacaggccaggcgcagtggctcatgcgtataatcacagcgctttgggaggccaaggtgggagaattgcttgagctcaggagttcgagaccaccctggccaacgtagcaaggccccatctccagaagttttgttttgtttttttttttttttttgagacggagtctcattctgttcgcccaggctggagtgcagtggcatgatctcggctcattgcaacctctgcctcccgggttcaagcgattctcctgcctcagcctcccgagtagatgggattaaaggcgctcgccaccatgcccagctaatttttgtatttt[132 bp omitted]acaatgagcatccttggacatgaatctcttacactctctgaagtttttcttcaggacaaattcatcctggagttgcttgtcaagagaccataaaacaaatagtaaggcttttgatacattttatcaaattatctctgaaacttcataaaatacatatccttccattgtacatcagcctgttcatttactctcatccatgccaataatgggagttgttatatatatataatatataatattatgtatatcacatattatatatagtatatataatataattatatataataaatatattaaaaattatatagtttatataattatataatatataaatatatatttcatatataaatatatgtatttatatataaatgtatatttcatatataaatatatgtatttatatataaatgtatatttcatatataaatatatgtatttatatatataaatacatatatttaaatatatatatttttagacggagtcttgctctgtcgcccaggctggagtgcagtggtgtgatctcagctcactgcaagctgcgcctcccaggttcatgccattctcctgcctcagcctcccgagtagctgggactacaggcgcccgccaccatgcctggctaattttttgtatttttaatagagacggggtttcaccgtgttagccaggatggtctcaatctcctgacctcgtgatccactcgcctcggccttccgcccacctcagtctctcaaagtgctgggattacaggcatgagccaccgtgcccagccccaggagttgttatattttaaaaatcaaggtatatcatctagcaagtctacttctagatctgtgtccaaaatagttgaaaagaggtgtttaaacaaatacatggctgggcacggtggctcacacctgtaatcccagcactttgggaggctgaggtgggcggatcacaaggtcaggagattgagaccattcaggctaacacggtgaaaccccatctgtactaaaaatagaaaaattagccgggagtggtggcgggtgcctgtagtcccagctacttgggaggagaatggcgtgaacccgggaggtggagcttgcagtgagccgagatcatgccactgcactccagcctgggtgacagagcaagactccatctctaaataaataaataaataaataaataaacataaatatatttgtttgtaaatatcaatatattaataaataatatcaataaatggttggtggatgaatggaagagatggattgatagatcagtgggtaggcagtgtatggatgaatggttggatgcgtgtatggatgaatgatcacaggaatagatggatgaatgggtgtacagatgaatggaagaatggatggacagatgaatggacggatgaatttatggaaggtgtattataatagatgatggatgtatagatggaaaaattgatgataggtggatagatgaatgaatggatggataggcgaatggatgagtctatagatggatgatgaatgtatggtggcagtacggacggacagatcaatggacagatggatggatagtgaatgtatggtgggagtatggatggacagatcaatggacggatggatgggtagacagttgggtaatagtgggtggatggatggtgtcttagtctgtttgtgttgctacaaaggaatgcctaagtctgggtaattaatttttttaaagaagaggct[131 bp omitted]cctcagcctccccagcagctgggactacaggcacccgccaccatacctggctaatttttttgtatttttaatggagacgcggttt[139 bp omitted]atatcttcttctgatgagggcttcaggaagcttccactcaaggcaggaagcctccctgtgcagattacatggtgagagagagaaggaagatgccaggcgcttttcaacaatgagttctggcagaaaataagagtgagaactcactcctgtgagaatggcacaaagccattaatgacaaatccctcccaccagaccccaccttcaatgttggggatcaaatttcaacatgagacttgggaccaaacaaatcatatccaaaccatagcagatggatgagtgggtgggtgatggatggagggagggagggaggaagggatgaatgggtggatggacgacagaatggatggatggataggtagatggatggatgaatgggtgggcaggtggataggtggatgagtggatgggtagatgagtggatggatgggtgggtagatgagtgggtggatggatggatggatggatggatggatggatgggtcaatgggtggatgggtggatggatggatgggcacatgggaggatagatggatggatggacggatgggtcaataattgggtggatggatggatagagaaatggatgggtcaatggatggatgggtgggtggatggatggatggatggatggatggatggatagagaaatggatgggtcaatggatggatgggtgggtggatggatggatggatggatggatggatggatggatggatggatatgtgaatggatggatgaatggatggatgagtgggtgggtggctggatagatggatggatgggcaggtatatgtgtgggtggatggatgggtgggtggatggatggatggatgggcaggtgcatgtgtgggtggatggatgggtgggtggatggatggatggatgggcaggtgcatgtgtagatggatggatgggtggatggatgtgtgaatggatggatgagtgggtgggtgggtggacagatggatggatgggcaggtgcatgtgtgggtggatggatggatggatgaatggatggattaatggatggatggatggatgagtggatgggtgcatggataaggatacacatggatgggtgaggagatgaatagacaggtagttgggcaattgtccctgtgagtcccgcatcaatgggaatgcatgccaccccttccaagggcctcttggctcacaggtgttgcacttccaggattgaatgcagccatctgccactccctggatcccagtctccctgcacagactcatcctgggggaggggacacagagtccacgttgctgcccctcccatgctagcctgcaaacctcctccccagcaagagcagatccaggagccacgaatacggtggaggatgcaaaacggtaattaatctgtggtgggaggggggtgttaataccttaaagacacggggacacactggcagctcctaccaattagtgacctaaccctgccagtgtgctctccgcggtgtggccgagttgattactctaattaattttgcatcgacctacatggatctgctgggagagggctgatcggcatgggagacagatgctgccaacccgtagcacccccctcattgcccagtccacaaggtcaaacgccatcccacctggcctcccgggccctgggaaggtggggtcgctcccgactctccaggacacacaccaagacctgcctccctcccatcctcaaaaagcagaggggggccgggcgcggcggctcatgcctgtaatcccagcactttgggaggccaaggtgggtggatcacctgaggtcaggagttcaagaccagcctggccaacatggtgaaaccccatctctactgaaaaatacaaaaattagccgggcgtggtggcgggcacctgtcatcccagctacttgggaggctgaggcagaagaatcacttgcacctgggaggcggaggttgcagtgagccgagattgcgccattgcactccatcctgggtgacagagcaagactctgtctcaaaaaaaaaaaaagaaagaaagaaagaaaagaaaagaaaagcagaggcgggtacagttggacaacccacactcactcccgccttggtgtccttgtccagcagtggcagggagggctgggagcagagcgccttccagggccaacagacacccctgaattggtcttgatgtcatttcaacctgagaatgaacagcagtgatggaccaggtgtggtggttcatacctgtgatcccagcactttggggaggccaaggtgggaggatcgcttgagcccagaagtcgaggctgcagtgagccgtgattgcaccactgcactccagcctggacaatagagcaagaccctgtctcaaaataaataaataaataaaagacaatagcagtgatgggggcgtcagatgggagagaatggaggcggcatgaactagatgcttacagttcttgaggcttccctgtcttggcttttaccacagcccaggctaaccttaccatgcatgggggagctgccctacatcccaaggtgtattaatttcctattcctgccataacaaattaccacaaac[143 bp omitted]tctactaaaaatacaaaaaaaaaaaaaaattagccaggagtggtggcgggcgcctgtaatcccagctagtcaggaggctgaggcaggagaattgc[134 bp omitted]aggtcagaattctgcaataggccttactgagctaaaatcaaggtgtgggcagcactgggtcctcccagaggctccaggggagaacctgtttcccacacccctcagctgggggccccttcctccacctccacagccagcagcacagcctcctccagtctctgattgtcaccttcctgcctccttccaggagggccctgtgatgacgttggggccccggataaccccggatcacctcccattccaagttccttaacccaatcccacctgtaaagtccctttggccatgtgaggtgacaggtgacatatccgcaggtcctggaggttaggacgtagactttggggaggggagttactattctgctgaccacacaggagcatcttcctactgaggcaagtgatccccaactcatgttcagagctggatacagccgcacctgaatgcaatgttaattttattattattttattttattttattttatgtttgagacaggctctcactctgtcacccaggctggagtgcagtggcatgatctcggctcactgcaacttctgcctcctgggttcaagcgattctcctgcctcagcctcccgagtagctgggattacaggcacctgccaccatactcagctaatttttatatttttagtagagacggggtttcaccatgttggtcaagctggtcttgaactcctgacttcaagtgatccacctgcctaggcctcccaaagtgctggagttacaggcgtgagccatcgcgcctggccgtgaatgcaccgtttaacttgaactaacccatcctgagacaacagcctggggaccaagaatctctcccggcttttcccaacaccccagttccccgccccgttttctccattaccagatgaatgatgaggaaggactacagtgttgagttgaactacagacaagattttgttgtttacagctaggtgcatgttcatatatacatacacctttgtaatccccatccaaaaccaagatctgaaacattttctttaccccagaaggcccccttgttcccctaccagtctccaccccctggggtaatcactgccctgacttccatcattaagaactggttggccgggcgcggtggctcacgcctgtaatcccagtactggggaagccgagatgggcggatcacctgaggtcgtaagttctagacaagcctggccaacatggtgaaacctcatctctactaaaaatacaaaaattagctgggtgtggtggtgcacgcctgtaatcccagctacttgggaggctgaggtaggagaatcacttgaactcggggggcagaggttttggtaagccgagatcatgccactgccctccagtctgggcaacagagcgagactccatctcaaaaaaaaaaaaaaaaaaaaaaaaaaaaaagaactggttataacatctgctctggaaattcatcagaatggaatttatgcatgttcagttgtgtctgctccttttatttaagaatatgtttgagagattcgtccgtgatactggatgtttcgatgcttgtagttatttattgttctgtagcattctattatatgaagatacaaccactgggtctaccttgagcaaatctgctatgaacaatcttttttttttttcttttttgagacaacatctcactctgttccccaggctggagcacagtggcacaatcatggctcactgcaacctcgacctcccgggctcaagcaatcctcctgcctcagtctcccaagtagctgggactacaggcatgcaccaccatgcctggctaactaaaaaaagattttttttttttagagacagggtctcgctatgttgtccaggctggtcttgaactcctgagcacacgtgatctcctgaggagatgtctctgcaaa[151 bp omitted]ctactgaaaatattaaaaaaaattacccgggtgtggtggcgggcgcctgtagtcccagctactctggagactgaggcagaagaatggcatgaacccggga[137 bp omitted]acaattgaaggacaaaaaagaacgtggaagaaatggagagacatcccaactgccaggtgaaatggccaaataatgttaaaatgtcaatttcctctatgtgaatccatacatctttatttcaataccaatcaaaattccaatctgacttttgttcagagtgaaggagaaccgaacacaattattttaaaattcatatgaaagaatatacatttcagactcaccaggaatttttttttaagaaaagagtagaggaagggcatttgtttttgtaagaagttgaaatgtattgtaaaatgacaataattataaagttacaatatcgtttacctaaaaactaatcaaagtgtatattaacttagagtggaattgaggcgtctttccctttttggcgg[142 bp omitted]catggtgaaaccctatctctattaaaaaacacaaaaattagccgagcatggtggtgggtgcctgaatcctacctactcgggaggctgaggcaggagaatcgcttgaacccgggccgagatcgctccattgcactccagcctgggcgacagagcaagactctgtctcaaaaaaacaaacaacaaaaaaagaatataataaagaagctggggacagtggtgcacacctgtaactgcagctactcaggaggctgaggcgggaggatccctagagccagggagttcaaggctgcagtgagctctgattgcaccattgtactccagcctgggcaacagatcaagaccctatctttacaaaaaagtagagactctgtctcaaaaaaaaaaaaaagaaagaaaaaatatatataaaataacgtgggttgtgtattccagtatgtcaaagaaaatctatttctcagaatctaaaatctctctcacaactataaagagatatttatataatggtcattgcagtattctttgactagtttttttttttaaattggcaataatctaaatgtctgtattaatcagggtccctgctatggtaaattgattgcaaaactggtctcaattcttcatgctgtcccggcgcggtggctcaagcctgtaatcccagcactttggagggccaaggcaggtggataacttgaggccaggagttcgagaccagcctggtgaacaaggcaaaaccctgcccgtactaaaaatgcaaaaattagccaggtgtggtagcaggtgtctatagttagtcccagctacttgggaggctgaggcagaagaatggcgtgaacccgggaggcagaggttgcagtgagccaagatcgagtcattgcactccagcctgggcgacagagtgagactccgtctcaaaaaaaaaaaaaaaaaaaaaagtttaataaagagggttgctttattttattttatttattttttatttatttatttttttcagacggagtttcgctcttgttgcccaggctggagtgcaatggtgagatctcggcccactacaacctccacctcccaggttcaagcaattctcctgcctcagcctcctgagtagctgggattacaggtgcatgccaccacacccagctcgtgtttttatttttatttattttattttatttatgtatttatttttgagatggagcctggctctgtcacccaggctggatctcagctgcactggcaggatctcagctcactacaaactcctcctccccggttcaagctattctcctgcctcagcctcccgagtagctgggattacaggcatgcaccaccatgcccagctgatttcatatttttagtagagacaaggtttcaccatgttggccaagctggtcttgaactcctgacctcaggtgatctgcccgcctcagcttcccaaagtgctgggattacaggcatgagacaccgtgcctggctcctatttattttgttgaaacagggtctcactacattggccaggctggtcttgaactcctgggctcaagccatcctcctgcctcagcctcccaaagtgctgggatcacaggtgtgagccaccacacctgttcctataaagaagatttttttaaaaagggctgggtgcggtggctcacgcctgtaatcccagccctttgggaggccaaggcgggtggatcacaaggtcaggagttcgagaccagcctgaccaacatggtgaaaccccatctctactaaaaatacaaaaattagctgggtgtggtggcatgcacctgtaatcccagctactcaggaggctgaggcaggagaatctcttgaacccaggagacggaggttgcagtgagccgagattgtgccactgcactccagcctgggcgacagagcaagactccatctcaaaaaaaataaaaaaattaaaataaataaatttttgaaagatgtagaggccttgagaaacaagacgaatggtgcagaatctccaggctaggaacatgtgggagccgtgagcatcagagactgaaggggttcagggagacagtggccacgggaacttctcctcccactctccaatgtcctataagaattgtttgttggtcaaacccagctggaaaccagagagcaaggaaaccccacgggtcagcctccctgggcacagagcagggccctggggagaaaatggaatttaaccagctcagtgtttatcaatacaagaatggttacattctcaacagagcatcagcatgtgcacatggggtatataaagccattaacagtccaggcatcaaggctcacacctgcaattccagcacttgaggaggctgaggtgggaggatcccttgtgtcaggagttagagacgagcctgggcaacacagtaagaccctgtctctacaaaaagtacaaaaattacctgggcatggtagtgtgtgcctataatcccagatagtctaaggaggctgagttgggaggatggcttgagcccaggagtttgagaccagactgggcaatatagcaagaccccatctcaaatattttttgtttttgtttttagatgacatcttgctctgtcgtccaggctggagtgcagtgatgccatctcagctcactgcaaactccacctcctgggctcaagtgattttcctgcctcagcctcctgagtagctgggattacaggtgcctgctgccacgcctagccaatttttgtattttttttggagatggggtttcaccatgttggccaagctggtctcaaactgttgacttcaagtaatccacctgcctcatcctcccaaagtgctgggattacaggcatgagc[309 bp omitted]tggcgggtgcctgtagtcccaactacttgggaggctgaggcaagagaatggcgtgaatccgggaggcggagcttgcagtgagccgagatcacccccactgcactccagcctgggcaacagagcaagactccgtctcaaaaataaataaataaataaataaataaataaaaatacaaaaattatccgtgtgtggtgatgcgtgccttaatcccacctactccggaggctgaggcaggagaatcgcttgaacccaggaggcggaggttgcagtgagcagagattgcgccactgcactccagcctgggcaacaagagtgaaactccatctccaaaaacaaaaaacaaaacaaaacaaaaaacaaaaagggatgttcatatctctaagtgcagctacatttttaaaagcctaaattattatgaatcaaaataagagaggtatcaacgccatgtaggagcgtggaacagaaaaagaacattcctgaaaagc[143 bp omitted]cgaaaccccatgtctactaaaaatacgaaaattagccggacatagtggcacattcctgtaatcccagctactcaggaggctgaggcaggagaatcgcttgaacctgggaggcggaggttgcagtgagccaagatcacaccattgcactccagcctgggcaacaggagcgaaactccgtctcaaaaaaaaataaataaataaaaaataaaaaaagaactgaaattaattatcaatgatgacattttcttcattttactttttaatattttctaattagtttttcagtcagaaagaaagaacggccaaccatgtacggcaggtcacagataatatgcaaagccatttctgtaaacgtctttaatatttatgtacaattattttgcacgtatgtgcatgtttacaggcaagacacttccaaagctttctctctggaacagtgagattgataattttttgttgtggtggttgatggtctccattttactacagttttaccacccaagacacgcattgtttgtgtaataaaaaataataactagatttatttttctacctccttcacttcccctgtggcctctctcgaatttgcccgacaacctttcccaacacccatgataattgatccttaatcaaatattcaaatgggtgcttcaaggaaaggcacggtgctttggcaatttggatgataaataatatttcttcgctttgtcccccccacgctgcttctccctccctagtccccctctttttgcagcccaaccccgacgtcgccccccgccccactagaatctcgcaaatatcttttggttttaagagttccctggggaagccttgttctaaatgaggtgtaaaaatctaagcggcacaaaaaaaaaaaatagtgcgaggttggaatcaatattctcttcacagctccatcgattaacaaccatattcttcatttattaattatgaagggggatttcagagcctccgtctccttctttcgtggtaacatggcggcttcccctcctccctgcctcccccaggtctggggcctgtggtacccagggctcagcatccccggggccaggggaagagggagggaagtgggcgttctgcccccactggcaggtccagccaggagcagagagctctgtctggctttggaatctgcctcaacgcaaaggagtctagttctccgttcccgtgctggctttgccatctgtctctttagaagacaagctccatggccgggtgtggtggctcacgcctgtcatcccagcactttgggaggccgaggcaggtggatcatctgaggtcaggagtttgaaaccagcctggccaacatggtgaaaccccgtctctgctaaaaatacaaaaaattagtcaggtgtggtggtgcgcacctgcaatcccagctactcgggaggctgaggtaggagaatcgcttgaacccaggaaggcagaggttgcagtgagccgagatgctgccactgcactccagcctgggcaacagagtgagactctgtctcaaaaaaaaaaaaaaaagggggagataagctccatgtgggaccttgtttgctttccccagctgtgtttctgactctgggcgcacgtgctctatgaaactgtgctgagtgagtgataagacagtggcagaatcacatacacaagagacgggaaggaaagagtggagttcaaaagctggctctgactacggtccattcatgtgcgttggcctctgggagtctcgcctccctttctgctgctctatttctgaccctggacacacatgctcagtaaagctgtgctgagccagttaaccatgagcagggtggcggagtgcggcacctggcagccctggatctcgctttcctaacctcgtgggcctcagttttctcatctgtaaaatggcacctccatcagatgaggccatacctcatgtcagcctttgtttgggctgaacccccttgtttatattggggggatgtctttgatctgggaagtcactgggtcaggacgcaggtcagattcacctttgtccccagagcacagcatcaggatggcccagaagtgatcactgaaagttcttgcgggtggacaaatggatgggtgggaggttggatgggatggatgcatgagtgagtgtgtgggtgggggatgaacggatgtatgggagggcagacgagtgaatgggtatgtaagtggatagatgcgtgaatgaattggtcaatgagtctgagtgtagttggatgggtgactggaggaattgagtgaatggatgtatggatagatgggtacatgggtgtgtggatgggtggaagggtgagtggataggtagaacaatgaatgggtggatggcaaaataaaagataaacaatgaatgagtggatgaatagatgggtaaatggtctggtgaatggatcggtgggtggctggttggctaggtgggtgagtggatcgatatatgagtgaatatatgtgtaatgagtgggagaatagacaaatggctagatggatgggtggacggatggctagaaagacagacaaatggatgagtggatgggaggataaatgggtggatggatgggagggtggatggatgggtggatggatggataggtgggtggatggatgagaggatgggtgggtgggtggatggatgagaggatggatgggtggatggatggacagatgggtagatggatagaaggatggctgggtgcaggaggatgaatgggtggatgggaggatggatgtatgggtggatggatggataggtgggtggatggatggatgtataaatggataggatagatgaatggatagatggataagtgggtggatggatgagaggatggatgggtgtagaggatgaatgggtggatgggaggatggatggatgagaaaatcagtgggtggatagatgaatgaatggatgagaggatggaggacaaatgggtgggaggttgaatagatgaatggatgaataggtgggaggatggatggagggttgggtgagtgagtggatggatggacagaggggtgggaggatggatggatggatggatggatggatggatggatggaacatggatggatggatggatggatggatagatggaaagatggatggatgggtggatggatggatgtgtagatgggtagatggatgggagaatgaatgggtgtgagaggttggatggatggatgggagggtggatggagggatgggtggatggatggattcatgggtagatggaggacggataagtgtgggaaaatggttggatgataaatgggtgagtgtcttgatggaggggcaggtgggtgggttggtgggtggatggatgggtagatgggtagatggatgagagaatgaacgagtgtgagaggatggatggatgggagaatggatggacaggtggatggatggatggatggattcatgggtagatggaggatggatgagtgtgggagaatggatggatgataaatgggtgagtgtcttgatggaggggcaggtgggtgggttggtgggtggatggtgggtgagtgggtgggttggtgggtggatggtgggtgggtgggtggatggtgggtgagcgggtgtgtggtggatggtgggtgggtgggtggatggtgggtgggtggatggtgggtgagtgggtgggtggtgggtgggtgggtaggtataggtgggtgaacacagggcctcagcgggattattttgcgttggttcccggtgcagcacttaagctttccggagctccctttccaagtatttgttgtacctgtaggaggacacctagtccggctcagttctctgtaaaggacagtggggtgcagtggggagggggaggggaggcctataagagggtctcatcagttctccagccggggactggagctgggatcaagtggtgggcggaggaggggtgcaggggggaagagcagaattccagggccagaagggactccaggttgagtgggaagcccagccacccagcctggccccctctccacctccctgacggaccctctaacaaccgagctggccgctcccctccctgcccaccaccaccctccagggctcccgacgcccctgcccatccccccgcccctcccccactccaagcgctcccagcctccccctcccccggccgtgtctgtaccccgcccccctgctctccgcgggggcccgggaggagaggaggcggctccgtgctgcggggtgccggggcgcagagcccgcggcgggagctgtcagcgccgatcgtggggagggggctcctctgccccaggtcgatgggagcgggggcccaggctgcggtttacactgaatccacaaaaatcaccgaagcttgaaaagtgctcaataagccatcgatcgctctctgctgatcggtgccgccgccgcagcggggctggggggaaaggcggggcgagcagacccaggctccctgcctgtgccccacgcgggaccgcggccctgcatctgccccccacccacgcgaggctgcagccccagggcctgggcaagaggttcccatcccgcctgcaggcccgggctgcaggcctgaccacgctgaggggtggggagggagggggttagaaagaacgccccctcctctgtcctcccaaagctctctgtggccctgggactgcaaaattcttccccaggccgggcgcggtggctcacgcctgtcatccctgcactttgggaggccgacgagggtggatcgcctgaagtcaggagttccacaccagcctggccaacatggtgaaaccccggctctactaaaaatacaaaaattagcctggcgtggtggtgtgcacctgtaatcccaactactcgggaggcggaggcaggagaatcccttgaacctgggaggcagaggttgcagtgagccaagatggagatactgcactccagcctgggcaacagagcgaaactccgcctaaaaaaaaaaaatccttccccagatacttccagagatatggaattaagacaaatcctggctcattcactgtgactgctgtgtgaccttgagtgtgtttcttaacctctctgtgcctccattgccatatctgtaagatggatatggcagcacgcaccctgcctgcaattcatggcttccttagggtctcacttgtgaatctcctctggccttttggcaacttctttccttctcagctggggaagccgttttcctgcctgaaaaacctcttccccagtgcaaggcttggaggctggacacagttcggggcattcagggaactgccagcaccagtggccatgtattcgggaggaggtgagtgggaagaggtgaggccatggggtgggcagccacttgccaggggcagtgtttgttcttaattctggaggtagcagggagccatggaggatctagagcagaggtgtgacctgaatcaaatcgctccttccccagagctgagcctctgtcctgggttggcctctgtgctgatctcacctcctcttcctctccccccatggcccactggtcaccactcctggcccttctccctctgaagtctctcccattgaccccacactggctctctagggacctcccaaggccagatctgaactcggccctccctcactctaagccctcccaaagctccctgtggccaacccaagcccttggcccagtgctctacccccactctatgaacgagctgttccactgcaagtccagccacgcgccgcccagcccgccaggcccacctcccaccgcagcaccccctggctgttgtcacactcgcccgcatcccacccagcctttgcccagcagttcctctggactggaggtcgttccccaccctgcatgctggcgaaagcactcctcatccttcaagcctcttttccaggagccctcccaggcagcatctcccagagacagccccagcccgaggcctcctccgagccctgtctgcgtcttctcttgcagcccaggctgggggtgccttctggctgggggcaccttctgcctgttttgtagaaggcggaagaacgaggtattggtagcaggggctggggttggaggagcccaagagacacaaagccagaaccttcctccaactgcctggaaatctgaggccccactggtagatcttgcctcccacagctccctctggcctttcagcacagcccccaactgacacccagaaggacccccccacaccaggtcccaaggggagagagagaagagaaaaaaacagagagaaaaggcaagtgggatcagggcctccctccactacccgtttcacaagacccccccttctttctggaggcccccactctgagagtctcagctcccccacccgagccccccatctgatctgtgcaggctcaggggccgcccccactccctccctcaccctctccccaaaggtcagggagcaaatttcatccccacgtgtctctcacacctcgatgattaataattgaagaaaacgtatttctttgggggcccaggatacatcagaaataactacagaattcatatgctgccagaggcacgacacccatgggaagacagagccaggagaggggcacgggcttctgagggcccagaagctgacggcgctgcagaatgatttcaaaaccaccctaatagaatcacccatggaggacgttctcagcactgggaaggcaccgtgctgaggctttggaagccaatgacctcaccagctccattttacagatagggaaaccgaggcacagaccagggaagtgacttgctcgtggtcacacagtgggattcaagcaaagaccgtcccccacacccctttaacctgtcctcccgtcaccagtgccacacttcctgcacccaggatggcacaagggcatagaggccgggggcatggggaagctctcggtcctgcaccctgacagcctgtggcctgctcatcacagacgcgtcatccccactcacccagcatgtcttgaaattttttttttttgagacggagtctcgctctgttgcccaggctggagtatagtggcgcgatctcagctcactgcaacctccacctcctgggttcaagcaattctcctgcctc[135 bp omitted]ggcctccccaagtgctgggattacaggcgtgagccaccatgcccagtcatgtcctgaaaatcttgaggcatctaagttccgatgccttgcccaggctcgtttaatcctcacaaccacccctgctcacacaggagaagaccaaagctcagagaggtgaagccacctgcctggggtcccatgacacagggaggcaaattcaggtgtgtccttcttatgagtctgtcttatgagtcctggcattgcccctctcattggcatctttttttttttgagacagagtcttgctctgttgcctagtctggagagctctgcagcctctgcctctcgggttcaagtgattctcctgcctcaggctcctgagtagctgggattacaggtatccaccaccatgccgggctaattttttttttttttttgtatttttagtagagatggggttttgccatgttggccaagctggtctcgaactcctgatctcaagtgatccgcccgccttagcctcccaaagggctgggattacaggtgtgaaccaccatgcctggccccattggcatcttgaggctcagccccatgtgaggtgggacgggtgatgcttgaccccatatggggcctgccccaggatctacttgatggaaattgaagatgtcagaagacactgaggtgcatccaggttcagagatgtagctgctgcactagccaatgggtggaggtgcccaagcgtccatcaccagaaggatggatccacacaactcagccacaaaaaggaatgaggctctgacccaggccacagcatggatgaagcttgaggacatcacactcagtgagagatgccagacacagaaggacaaatcctgtgtcactccacgcatgaaagtgccctagagtcatcagatccagagatagaaagtaacatgggggctgggcatggtggctcatgtctgtaatcccagtgctttgggaggctaagttgggaggatggcttgaacccaggggtttgagatcggcctaggcaacgtggcgagagcctgtctctacggaacatacaaaaattagccgaacgtggtggcacctgtaatcctagcactttggaaggctgaggcaggagcatggcttgaacccgggaggcagaggttgcagtgagccaagatcgtgccactgcactccagcctgggcaacaaagtgagactctgtctcagaaaaaaaaaaaaaaaaaagcttgagatgggaaactttatttatatatgttttaacaccgtttaaaaaattttgggccaggcgtggtggctctcgtctgtaatccccgcactctggggggccgagatgggtggatcacctgaggtcaggagtttgagaccagcctgaccaacatggtgaaatcccatctctactaaaagtacaaaaattagcctggcgtggtggcgtgcgcctgtaatctaagctactcaggaggctgaggcaggagaattgcttgaacctgggaaacggaggttgcagtgagctgagattgtgccactgcactccagcctatgtgacacagcaagactttgtctcaagaaataaaataaaataaaataaaacaaaatttttcagaaagggatgaagttctgacccagaccacagcatagatgcaccttgaggacgtcacgctcagtgagagacgccagacacaaaaggacacacagtgtgtgatcctgtttctatgaaatgcccaggaaaggcccatccacagagacaggaggggatggaggggtcagaaattctagatgctttttcattcaggtgtacgtgctgggggggcctttattattcacgtgcccatcctccgcttatttcaatgtgttacccttgcccgatgctgctcttctgctgtgttccggaacaaaacgtactgggcatagctttgctacccaagcgaaggggactgagaaacagcggtggcctcctccttgggtggaatgctgggtggtcatcaaaggtgatgggggaggagacatttaaatgacacgggaagatgcccgtgagataacaggaaagacacagaccacatgagagtcagaggtcaggtgagcccattttggtaaaacccctgtctgttgtttttttaagagaccgggttggccgggcgcagtggcttacgcctggaatcccagcacttcgggaggccgaggcgagtggatcacctgaggccaggagttcgagaccagcctgatcaacacggtgaaaccccgtctctacaaaaaatacaaaagtagccaggcgtggtggcgcatgcctgtaatcccagctactcgggaggctgaggcaggaggattgcttgaacccaggagacggaggttgcagtgagccaagatggtgccattgtactgcagcctgggcaacaagagcaaagccctgtctcaaaaaaaaaaaaaaaaaaaaaagagagagagagagagagagggtcttgctctgtcacccaggctggagtgcagtgatgcaatcatagttcactgaagcctccaactcctgggctcaagagatcctcctgcctcagccttccaaagtaatgggaccatggccaggcaggtagctcatgcctgtaatcccaacactttgagaggccgaggtgggcggatcacctgaggtcaggagttcaagaccagcctgaccaacatggtgaaaccccatctctactaaaaatacaaaattaaccaggtgtggtggtgcatgcctacaatcccagctacttgggaggctgaggcaggagaattgcttgaatccagtaggtggaggttgcagtgagccaagatggtgccattgtactccagcctgggcaacaagagcgaaactccatctcaaaaaaaaaaaaaaaagaaaagaaagaaagaaaagaaaaagtaatgggaccacaggaactcaccactctggctatttttctaatttttatttttgtagagatgagatctcgccatgttgctcaggttggtcgcaaactcctggcctcaagtgatcctccgacctcagcctcccaaagtgctgtttttataggcaagagcgatggcgcccggcctcctagagctttaggagggagtatggccctgcccacaccttgatttcaaatttcaggcctctagactgtagaaaaatacatctgtggggttttttgttttgtttttagagacagggtctcattctgtcacccaggctggagtgcagtggtgcgatatcagctcactgcagccttgacctcctgggctcaagtgaccctcctacctcagcctcccaaataattgggacaaaaggcaccaccacacctggctaatttttgtatttttttgtagagatcggagtctcgctatgttgcccaggctggtctccaactcctggcctcaaataatcctcctgcttcagcctcccaaatcattgggaccaaaggcaccaccacgcctggcaaatttttgtagatatgggtggggtgggtctcgctatgttgtccggactggtctcttaactccaggcctcaagcgatcctcccgcctcggactcccacagcgctgggatcacagcctccccccgccccgaggtagcgggtggtgggaacgggattggaatcccgactgtggggcccctgcggccacctccaggatacagcggaccccgatgaagccctggcctgggtgctgggggaggctccgcggcgcggtcccgcaggcgggaggcgatgctgccgacgctattgctgccattactattacggagagatggggcggggcgggagcaccgggcccttcccggaagcccttcctgagcttattcagtgcctggggccgcggcgatcgatgacagctgggcgccggccgagccccctccgggccgcgcgggggcgcatgcgcggggccgcgggatcgatcggccgcgctcgggcctccccgcacccgcccgaccccgcccccccggctcgttgcccggcaacctctgcccggcgcgctcccattggctggcggcggcccgggccccggccgcgcgtggtcacttggtcagcgcgggctcggcgtggccgggggcctggctccgggcgcgggtcgatgccgcctcgcatctgacctttcccggcgcggggagggggcccgagaggatggagagagctggaccatcttggaagaaaactttattgacccgtctcttatcttggggacgcacggttccagcggcggggggcgagggtacggctgggtgggggcaggggcggccaggaccttcctcccggacatgcacggaccccctgaccgccgccccggccatctccctgggcgggctgctctccattccctagacaggaaaattgaggctcacgagggcccggggattacccaaggcgcaaagggtttatgaggtgcaaggggcctggagcccagagagtgtggctcgagggcttcagactctctctgccacgccgtgctgacatctgcaccctccaagcaaagctaaaacatcttcccgcgttgctgggtcccacaccgtcgcagcctggaacccaccaccccataaggagggaccgttccttaaattgaaatgcgatgttgaacagccacgaaaaaggacgaaatcgtgtcctttacagcaacatacgtgcagctggaggccattatcctaagcgaatgaaagcagaaacagaaaaccaagtacccatgttctcgcttatcagtggaggctaaacattgggtactcatggacacgaggatgggaataatagaccctgaggacttctaaatcggggaaggtgggggacaggggctgagaaactcctgggtaccatgcttagcacctggatgacgacgggatcggtcatatcccaaacctcagcatcacaccatatacccatggaacaaacccgcatatgtactcctgaat[138 bp omitted]cttggagaaaccccgtctctactaaaagtacaaaaattagccgggcatggtggtgaatgcctgtagtcccagctactcgggaggctgaggcaggagaatcgcttgaacccagcagacggaggttgcagtgagctgagatcgcaccactgcactcctgcctgagcgacagagcaaga[134 bp omitted]aacagagcgagaccccatctctaaaaaataatatatatatttttttgagatggagtttagctttgtcgcccaggctggagtgcagtggtgcgatcttggctcactgcaacctccacctcctgggttcaagcaattatcctgcctcagcctcccaagtagctgggactacaggcacgcaccaccatgtcccactaatttttgtatttttagtagagacggagtttggccata[136 bp omitted]tgaaattaaaaggcttaggaacagtgtgagatcttcatgtccaaacgaaactcccattacacagaggccctgtgaggggaagccccaagtcaaggtcacagacttgagaaaagcttatggttattttgaaggggatatgggtagtgccctaaacattccaatttagtaaaaaaaaaaaaaaaaaaaatcgcaaatcccccaacaaccacttgggctcattcaaatgaacacctggactttgtcaaaagaagagttattgtcagaataaagacgctgcttataaaatgctagggttccctgtgtggagccaagaagatttcttctttctttaagggtgaaaaacaagattggcttatttgacagatctgtgcatttttttttttttgagacggagtctcgttctgttgtccagactagtgtgcagtggtgtgatctctgctcactgcaacctccacctcccgtgtacaagcgattctcctgcctcaacctcctaagtagctgggattacgggcacatgccaccacacctggctaatttctgtatttttagtagagacagggttttgccatgttagtcagtatggtctcgaactcctgacctcatgatccgctcactttggcctcccaaagtgctgggattacaggcatgagccaccgcgcctggccgtaaatgttttaatatttagcacgcatgatgcttttgatatacgtgccatgccaagtccagggctcagagatttgtttaaaggtctccattaatcccacatgtaccccaaatcgctgtggttttagaaaagaaaaccttctgtgcaactccgtaaccaccttaaaggaaatacaaaaggagaaaatcgctggccgtagccttctccaccccctaaactcagccctggccactttgctcaggcctcccagcttctgtgtcctgcacgtaagcctcggtcttcacacagtccctgatatctgcatttatttcatatttttcccataacgttccacctgacatctccatctccttcctctgccgctgcgtttctaattcctaacagctgaggaaggttgcattgaccggcggattgtgtggggtgatttttgaaagcagatcctggaattcaatttttattttaacctggttattgagtggggagggagagggaggcggaggttggccgattcgtgtgcaagatgaaaaagctggattttcacaaaggttgtgctgtttggaaatggctggttaggttttcaacgtaggaatggttcaacgacagccctacgagagtgtgcgcgagcgtgcgtggctccgtgtggtttcgtgtgtgtgtgtgtgtaagtgagctgcagggtgtgtggacaagtgtgttgtgtgaatgtgcatgtgtgggttcgtgtgtgctcctgtgtgttcccgtgtgtgcatgttgtgttcctgcatgtacatgtgtggcttcgtgtgtgtgcgtgtgtggttttgtgtgtgtgcatgtgtgtgcgcctgtgcgtgttcgtgtgtgtttgtgtgtgtgcatgcgtgtgagagggtgcactcagcggctgtgcctttgtacacgtgtgaatgtgggtgtgagtgtgtaagtgctttgtgtgagcatgtggggggaaggacgcagaggcacgccagcgtctgactgtgtgtattgttaagagtgttgtggggtacacgtgtgtatgtgagctcgtgagggtgtgcaagggatacacgcgtgttgtgtgtatatgtgtatgtgcatgtgtgtgtgcaggtgtgtacatattagtatgtgcagatcagtgcatacctacgtgtgtgttcctgtgtgcagatgtgcggccatttgagggtggcagtgcgcctgtgtgagtaggtacctaggacagcgtgcctgtgcatttgtatgtgagtgtgtgtgctgtttttgcacgcatgcaccggtgtgagggtgtgtgtgtatcggtgcacatctatgagcatgtcagtgtgtgtgagtggcagaaggtacacgggtgtgtacgtgcgtgtgtatacctgttcgtgtacctggcagtgtgtgggcatgtgcgggtgtgagggtgtgtgtgccggtgcacaccagtgtctgcacctgcgaccaccccgaccccgtgcccagccccctgaccctctcctgctgttctcactgcggggaaacgggtccaaccccaccactgaccccagctcatctcaggcctcccgtccacagccacttcctcaggagccctcctggacccgccagcccgggtctgaccccggtatcagcccgaggggcctcgtcttgaacggaggagccgctggttccactcatgcatttatttcataaatgttggcctcccgggagctccataatggcagaggcctgtccgccttgagcaggggtccctccccagagcctgggattaaagaagagaacccagtggtcctaggtgcgccgtgagaacatcaaacatcggccagggctgcacacgggaggccctcgggggtgcagcgtggaagccccctggacagatggagaagctgaggccctgtcaacaggtcccccgcgtcctccccggccctgtgttgatgggcggcagctgtgtccaggcacgctgtccccgttggacatggccggacgcatggatttccgaagccatctctccatctggcagctttattaacccaattccagggatcgagtgattgacgtgtttgcttatcggctcctcctgtctctccagggacgggtgcccaggtgcccccaccccacctccatcggcccagggggagaggggacaccagatcccccccacagccccgagaccaacgcgcgcacgcacacacacacacacactcacagtgactcccgctcaggggctcttggtggctggatcaattcaagtggatctttggagaacatgatgggccaatgtctaacaaaatttaaaatgtgaactcaggccaggagtggtggctcacgcctgtaatcccagcattttgggaggccg[134 bp omitted]gaggcaggaggatcccttgaaactgggaggcagaggttgcagtgagctgagatctcgccacttcactccagcctgggcaacaagagaaaaactccatctcaaaagaaagaaaaaaagaaaaaaaaattagccaggtgtggtggtgagcacctgtggtcccagctatggaggaggctgaggtgggaggattgcttgactctgggaggttgaggctgcagtgtgctgacactgcgtcactgcactccagcctgggagacagagcaagaccctgtctcaaaaaaaaaaaaaaaaaaaaagccagacacggtggctcacacctgtaaatcccagcagtgtgggaggctgaggcaggtggttcacctgaggtcaggagtttgatactagcctggccaacatggtgaaaccccatgtctactaaaaatattttaaaaattagctgggtgtggtggcaggcacctgtaatcccagctactcaggaggctcagacaggagaatcgcttgaacccaggagacgggggttgcagtgagccgacatcacaccattgcactccagcctgggcaacaaacgtgaaactctgtctaaaaaaaaaaaaagctgggtgcaattgctcatgcctgtaatcccagcactttgggaggctgaggtaggcagatcacaaggtcaggagtttgagaccagcctggccaacatagtgaaaccccatttctactaaaaatacaaaaattagccgggtgtggtggcgagcgcctgtaatcccagctacgtgggaggctgaggcaggagaattgcttgaacccgggaggcagaggttgcagtgagccgagattgtgccattacactccagctctgggtgacagagcaagactccgtctgaggaaaaacaaaaacaaaaacaaaaacaaaaacctttctagatatattcattgaaaaggctaggtgcccccaaatgagttggcaacttgtgtccacacaaaaccctgcacacgaaagcttatggcagctttattcatagctggccaaatcaggaagcaaccaagcttcccttgagcaggtgaacgtatcagtgggctgtggtgtattcagacagaggaggatcattcagtgctggaggaatggcatgtccagccttggaaaatatggaaaggagggtaggagtggggagggatgaaaaactacccaccgaagctgggcgcggtggctcacacctgtgatcccagcactttcggtggccaaggtgggaggatcacctgaggccaggagctccagaccagcctggccaacaaggtgaaagcccgtctctactaaaaatataaaaattagccgggcgtggtggcgggcgcctgtaatcccagctactcgggagtctgaggcaggagaatcgcttgaaccccagaggcggaggttgcagtgagccgagattgcaccactgcactccagcctgggtgacagagggacatttgtctttaaaaaaaaacaaaaaaaaaagctacatgctgaacagtgagtagagactggtcacattaagtcagagtatgtctctaagtatatacagatacttttttttttttttccccttgagacagagtcttgctctgtcacccaggctggagtgcagtggcgcgatctcggctcactgtaacctccgccttctgggttcaagcgattctcctgtctcagcctcccgagtagctgggattacaggtgtccaccaccacgcccggctaatttttgtatttttagtagagatggggtttcaccgtgttggcgaggctggtcttgaactcctgacctcagatgatccacctgccaggccctcccaaagtgcaaggattacaggcgtgagccaccgtgcccggccacggatactcttcatggtgtgtatcatgaggccctaggacagataatgaaggcttccacgtccaagggcacagggtggcacgggaagggttgaggtgggcatttatttttttgctgtttccatgtaagttttgtttctcccacgtatatatgtatattacttgctcaaaaacagattgcaaatgtgacaaaaattacagatacctattttgtagttcagcttttctgaggttcgcaggacaggggacgcccctcccacagcccagctcctctgcagatggctctgatctgacttccccagggacccagggcttttctcccgtgatccctgctcctggcctccagttcccgaaactcaccagctctgagcaggtaggaaaaagtggcttgtgtctacagagcccagt[143 bp omitted]agaaaccccgtctctactaaaaatacaaaattagccaggcatgctggctcatgcctgtaatctcagctactcaggaggctgaggcaggagaatcgcttgaacctgggaggcggaggttgctgtgagctgagatcgtgtcatttgcactccagcctgggtaacaacagtgaaactccgtctcaaaaaaaaaaaaaaatccactccaggctggacatggtggagggcacctgtagtcccagctactcgggaggccgaggcaggaggatctcttgaacccaggaggtcgaggctgcagtgagccaattctcctgtctcagcctccctagtagctgggattacaggtgccctccaccactacactccaccctggacaacagagtgagaccctgcctcaaaaaacaaaaaaaacaaaacaaataaaaaaacaatgcagtcctaccccttgcctggctgcccctgactcttaagggaatgatgacacctccccgccaggcccacagacgctgccgacccagcccctcctcacctcaatgctctcctaacccccaagcctttgcctgcttttcctacttctcttcactgaatgaactcctgcacctcctacgcctttcggggcaacggtgcccttctcaactcaggctcccagacccgctgtcagccatggtttaaagtctgccactggccgggcacagtggctcatgcctgtaatcccagcactttgggaggtcaaggtggaggaccacttgaggccaggagttcaagaccagcccgggcaatataaaattcgctgagcatggcggtgcaagcctgtagtcccagctactcaggagctgagtggggaggatggcttgagcccaggagttcgaggctgcagtaagctatgattgcaccactgcactccagcctgggtaacagagcaagaccctgtctctaaaaaaataaagtcagccaccaccctcacactgtgagcctctcccatcaccacagggccttccatggccagctccaggcctggcatcagcgggtgcaggaaaagctcagtggagcgattccacatctagggctcggcttgtaaaattaaaataagtggagacccccccacaacccccagccacacgcaggcagtaggaacccgggagatgggacgagcgccgaagggttattagcagatgcctcgagccccctcgagccccgcagagtgggggaggatggcggaggcccttttaaggacccagtatcaccgtcctttctcggccagccgggcacccacccacctgagtgagcctggagcagcccattaagcgatttttttcctccacttacggttggcagcatcgacaagcatgctcgatatctgacgaggtgctggccttggaagagagcgagccgcctcgataaactattccctcttgtcagcgcctcctcccgcacccagcccggagcttcgcgtttgatcccctcccctaatgagctcggttttctcccctccaggcggatgagacgctccccccaccctcgcccgctcagcctttcaagttcagctgggctgagattcaaggtgggggcggcggtggtggaaggaaaaccatttccaggttccgatggggtcacctcccccaggaagtcctcccagaatttctgcagctcagatggtctcgtgcatttgtggggagggtctggggtacagaaagagactgggacctagatatggggggtcgtacagcagtgtccaggtgccacgattgtcatctgtccattcattcaacaaagggtttgggggtgcagagctgggcacaggtgctcccagctgaggactgtgccaacgtgaggggctgggcaggatggggcaggggcccaggaggcggcagagcagcagagaccctcaagaggggacgatgacagcctgatgaacggacacagagttggccaaaccgggcttggtcagcctgcctggaggtgggggagagagtctgaaccccacccggggaggggcaggcaggtggcagggttgggagaagcccccttcccagaccagagaccctccagtctggcttcagcaccaagaacagctccctgcctcttcctctctggagctccagagggacccccatttgtcagatgtcccccagtcgtcgcccagatggaccagcttcttcctgccgaggccttcagggcctcccaggacctccctgggctctagtattttcaataaaataggaatcgtgccgcaacctcagggggtgggcacgcacagacatcaatgttgtttgcagacaatgagtcactggacactggccgatttttctcagcatctccaatatt[134 bp omitted]accctgtctctgcaaaaatttaaaaattagctgggtgtggtggtgaatgcctgtagttccagctactcaggaggctgagg[131 bp omitted]caataaatcatttcaaaatttaaaatcagatccaaccccctagttttattaaaatggaacctgaggcctgagaagaattatgcccctcccaccagccagattccagaatcttctctccaggatgaagggcctcatgggcaagaggaggccaggagggaagggggcttccaaggaagacttccacccaccaaaaggagccccagtcaggcgcggcagctcacgcctgtaattccagcactttgggagtccaaggcaggcggatcacctgaggtcaggagttcgaaactagcctggcaagcatggacaaaccccgtctctactaaaaatacaaaaaattagctgggcgtggtcgcaggcgcttgtaatcccagctactctggaggctgaggcaggagaatcgcttgaacccgggaggcagaggttgtggtgagctgagatcgtgccattgcactccagcctgggcaacaagagtgaaacttcgtctcaaaaaaataaaaaaaaggagccccatccattctccaaattataatggtgcactgtgcagggtgttgctgaggtcctggaagagagccagagcccccaggaagcccccccagggtcagggaagacaagggacccagaactgggccagagggagagacctgagtctaggggaagaggaagtaaaggccctgcggtagagtgggcattgaagctgggttctgcaggtagagtaggagtttcttagcaagagctaggagaacatggcccatgtggacagagtcgagaggggctgacacctgggctcaggttgggggatgccacctcctcagaggggactgtaatggtggatctggaagacccaggcttggagccaggctggtgagcccggctcacagcccaaggtttgctggggcctcagccaggactaggagcaggtggtggcagttggaggtgggctggaggagccgggcctgcccagagggacccaggcacccacggggcgagcggcgagggaggcagaaagcaaagcctcaccaacccccccctccactcaccagacatcaaacccagcctccccacctttcgaggttattaatttttcagagaagaaaatgctttttgtattttttccaggcaaaatattgataatgggcttaatgtggccttcctgcttttgtgtgtcgggagagagagcttttctgtcctggccgctgcagaagctgttcgcccccctccagcccccgcagcctccatcggcagaccccatgcacttggccgctgaagcccaggcagggagtgggggcgcgttttgatcgccaccgagcgggttggtgcagcccccctccccatctcgagccctcctacctccgcctgcacaaagccggacgcctgcccgccccaccgtgggtcgatgcaccctgccaggggagctggtgtttcccgcggctccaggctgatacatctttgagttgtttgaaattttgcttcctttctctcatggcgacggggaggcaggaaggcaggggcctctgtgcattcactccttcattcatgcattcattcattcactcactcactcacccagcccccagtcaccatgcacctgctgtgccccaggctctgtgctggatgctggggccaccggccgggacagatcgggcccctgcctcctcaaagttcatagtccaggagagagaagaataggtacaaagccaaaaacttccaggagaaaatatggcattacggacggtgatgagaaccctgtaagacagacacaggaggcctggtgcagtggctcacacctgtaatcccagcactttgggaggccaaagcgggcagatcatgaggtcaggagtttgagaccagcctaaccaacatggcaaaacccagtctctactaaaaatacaaaaattagctgggcatggtggcaggcatctgtaatcccagctactcaggaggctgaggcaggagaatcgcttgaacccaggaggcggaggtggcagtgagccaagatcgtgccactgcactctagcctgggcgacagagtgagactcggtcaaaaaaaaaaaacagacacaggagagagaaactgtgacacaggggagagccaatggaggctggggtctcagggagggcttccctgaggcagtgacctcagctgagacctacagaatgaggatgaggccgggtgcggtggctcatgcctgtgagcctggcactttgggaggccgaggtgggaggatcatttgaggccgggagtttgagaccaacctgcacaacattgtgaaaccctttccgtataaaaaatagaaaaaaaatagccaggcatggtggtgtgtgcctgtggtcccagccacgcaggaggctgaagtgggaggatcgcctgagcccagaaggtcaaggctgcagtaagctgtgatggcaccactgcactccagcctgggcaacatagcgagatggtgtctctacaaaaatttttaaaattaggccgggcgcggtg[168 bp omitted]gaggcaggagaatggcgtgaacccgggggggtggagcttacagtgagccgagattgccccactgcactgcagcctgggggacagagtgagactctgtctcagaaaaaaaaaaaaaaaaagaaggataagaggcctcagtgagatggggcagcgaggacctgcccttcctgggggggaacagcctgtgtgaaggcccagaggcgtgaggtagcagaacctgcccattcagtggttttcagacctgaacgtgcagcaggacccccgggggcctcattgaagcccagattcccgctccctcccatatccagaagccccccacattggcaggccctcattcagagaagctggggttgcagaatttgcacttctcacaagttctcgggtcacactgatgctcttggcccggggccctcactccgagaaccacagactcaggggctttgtgagatgaagacaccggccaaccctcgaccccaaggagcaggcaaggggtgggggccagagccggacaaccccagagccctcacttaccctctgggttctctaggagaattcccttgaaactccggtccttgatttccccatctggaaagcgggtgcttgataagtttcctggtttcctgtggctggtgaaggcacgaaccaagacgacacaggtagggtggttaatgcagagcctggcccacagcaagtgtttaataaatgtaagcagtgactgtgagcgctgatgaaggctgtgtatgggattgatgaaggggcaagaggccttcaccaggctggtggccggtgaaaatgcagaaactggatgggcgtggtggctcacacctgctacatgagcactttgggaggccatggcaggagaatcacttgagcccaggagtttgagaccagcctgggtaacatacccagatcccccatctctacaaaaaataaaaacttgccggctgcagtggctcacgcttgtaatcccagcactttggtaggatgaggcgggcggattacttgatgccaggagttcgagaccagcctggccaacgtggtgaaatcctgtctctactaaaaatacaaaagctagttgggcatggtggcacgcacctgtaatcccagctactctggaggctgaggcatgaaaattgctggaacccaggaggtggaagttgcagtgagccgagatcgtgccactgcactccagactgggtgtcagagcaagactgtgtctcagaaacaaaaacaaaaacaaaggcgggcgcggtggctcacacctgtaatcccagaactttgggaggcagaggcgggcagatcacaaggtcaggagattgagaccatcctggctaacacggtgaaaccccgtctctactaaaaatataaaaacttagccaggcagggtggtgggtgcctgtagtcccagctacttgggaggctgaggcag[137 bp omitted]tggtatatgcctgggaagtttgcttgagcccaggatgtcaagtccgcagtgagctatgatggcattgttgcactccaggctgggtgacagagcaagatcctgtctctaaataaataatgcagaaaccaagggcatggcacccatgaatgtgctagctgcagctgcgtaacaaatcactccaagtttaccagcttacagcaacacgcaggcactgtctcccggcttccgtggctcaggagtggcttgactgggtcctctttccaccttctcccacggtgccgatcaaggtgctggctgcgttgagctccttcctgaagttgaaagtccttgaccaaactcctgtggttgtcagaggaatgcgagtccttgaggttgtgggactgaagtccctgatttgttttattttggtagagaaggggtctcactatgttgcccaggctggtgtcaaactcctgggctcaagtgatcctcccacctcaaccttgttttcttcctgactgtcagagttcacccacccaccgttccctgcctggcctcttccagggaccaggagagaaggttctcagtttgctaaatggaggctttttttattttgagacagagtctcactctgttgccctggctggagtgcaatggtgcgatcatagctcacgacagcgattctcctgcctcagcttcttgaatcactgggatgacaggtgtgtgagccactgtgcccaactccagagtggagtcttatacaacacaagttatcgtggtggtgacacctaacacctttgccctattctgttggctacacggaagtcacaagcccaggcctcacttaaggggaagggatttgcaggatgaaaca[180 bp omitted]catg[137 bp omitted]gcccggccactggggccactttctatcaaccacacctggctcgggcatgcacctgccctcccccatgcatacaggcccacatccatgccttcaaatggccacaaaagtgtgcgtggccatagacatacatacttgcaagtgtttctctttttgtgttttgttttttgttttttttgagacggagtcttgctctgtcacccaggctggagtgcaatggcacaatcgcagctcactgcaacctccgcctcctgggttcaactgattctcctgcctcagcctcctgagtagctgggattacaggtgcgtgccaccacacctggctaatttttgtatttttagtagagacagggtttcaccatgttggtcaggctggtctcaaacccctgacctcgtgatcctcccgcctcagcctcccaaagtgctgggatgacaggcatgagccaccatacccggccagtgtttctctttttgcattgcccactgggaagctcagagacaaaattatggcctgtgtgtagcaaaggttcagaaccacctattgtgacttctcttccagcgacatctctcgaccttggttgtaattcattttctctggctgccttgtctgtttgcaattctttcctccccagtctttctgggcccatagaggctgacaatggcagcggcttctgtctgctcagcatctgagtgcagttctaaggaccttataagaattttctcattttatgctttcaagaaatctcctcctacagaggagggatctgccacacagagaggtcgtgagagccaccccaaggacaccagctgggagatgggagagctgggatgagaacctggactcaatccccagcgggcagatttttttttctttttagacggagtctcgctctgtcgccaggctggagtgcagtggtgcaatctcggctgactgcaacctccaactccctgcttcaagtgattctcctgcctcagcctcatgagtagctgggattacaggcatgtgccaccacacccagctaatttttgtatttttagtagagatggggtttcaccacgttggccaggatggtctcaaactcctgaccttgtgatccaccagcgggcagatttgagagctgggctacacactgacatgctttacatgcagagtgaccaagccaggagaatccaccagcaggggactgtggcgtcgcaaccccctccctggggtcgcaacctcctccccggggtctcagcccaagctttgaatgtgggctgccactggcataaataatcgtttataggccgggcacggtggctcacgcctgtcatcccaacactttgggaggccgaggcgggtgcatcacgaggtcaggagttcaagaccagcctggccaagatggtgaaaccccatctctactaaaaatacaacaattagccgggtgtggtggcggacgcctgtaatcccagctactcgggaggctgaggcaggagaatcacttgaacccaggaagtggaggtttcagtgagccaagattgcatcactgcactccagcctgggcaacggagcaagactccgtctcaaaaaaaaaaaaaaaatcgtttacaaatgtgttccaccacacattgatcccccacgagagaaagtgctgcttcagggaattctccctcgagtggcgtccccaggccggcccagctgcacccaacgaagtccacacgccaggcctgtccaggagccccttttggccactggacaagggtctggctgggccctacagccctcccagatctgatcccccaacaaagggaagaccaggatccagcgccacggtgccttcatgagctagacaggccctgagtcccgtgctccggattccactgaacagaactctcgtgcacgtttccccacggcgtgccccccagccggagccgggtgatggggacatcatcacaaactctgtgccctccaagggctcccaggcttggagagggagacaacagaaaaaggagcccgccatgctggcagcagggggcacacagtaggtccgcagcaggggaacaggaggacggattttacaggaccgggcaggggcacagtagggccctgttggccataccgacctctgactcctagttccccgccgaagccacctctttgcagctttgtgcccggggtcctccttgcacacctgggttttcctcgggccgccctccgggtagaacagctgacgtggatgagcgctgaccacgtaccagggcccgggccaagcatgcgacttacatctattcaataagtcaacgtggtccccattttacagatggagaaactgaggcacggcgagtgacttgagctgcccagggcccgtcagcaggggaaggggtgccagctgaactcgggagctctggcctgtcccgtggtgagccccacggcctgagtccacatcccagttctgccctttttaaggttcagggagctgcggcctcagtttgctcactcacaaaatgggaacgagtgtccggaagggatggaagggcacatgaacagaggcccccattctgaccattcttttttttttttttttttgagacggagtcttgctctgtcacccaggctggagggcagtggcgcgatctcggctcactgcaagctccgcctctcgggttcacgccattctcctgcctcagc[131 bp omitted]cagcctcccaaagtgctgggattacaggtgtcagccactgcaccccgcctgacgattcttaaagaagcaaaatccaggcccccaccccagcccggccccacaccagctggctcccaggaggcctgggctctgcctcgagcaccccattcactcctctcctgcagccccagcatttctacccattgagaggaatcaaaaaacagccccagccccaggaaggtggaaggaacagaaaaccagggctggtgcccacagggaaactggaacaaacccataaaactgaggctggtgaaccccaggccacctaactccaactgcacgggagccccggtaccatctccccagaatccgcccctcaggcctcagtttgctcacctgtgaagtggggcctgcaccgcccagctcaagggactatgagggaatctgcgcagatggggacaaagcagcctcccttcgctttgtgcaaacctctcctccttgccccggcctcctcctggcctccagagcagagctggcccccgactccagctcccccaggatcgatgggaggatcaattccagcagcagcaccgggctgtggggggaggggggctcctctgggaagcctccagttcccctcctccctccccctcctttcctcccccctccccttcctcccctttctcaccctcctcccatctcccctctgcttcctccccctcctcctcttcctccccctcctccccatcccttcttcctcatccttttccctcacctccccctccctcctcctcttcccccctccagcttctgtcctctgagcctggcccaggattccttgcccctcccccaccggtccaccctggctgtttatggggtgggcagaggctggtggccgcccttgtcacagcctttcctgagcactgtcagatgtcctcaagggtgcactgtgtgtgttttatccccattccacagatggggaaactgaggctccagaagggtccctgatgtgggaaatgaaggcggggctgggatttgagtctggaacccaccctcaaccccaaaggggagaagccccggacaccacgcaggcgctttgggaatgaggcacccttggcggatggactgggcgggctggggtcagaggtcacctgccctgcccagcagccgcatggagatcacccagtagccctcaggagtcggggctcccacttgtgaaccgggtacgccacccctggagatgcagagctggctggacacgcacctacctccatcttctattcccctctgagagctgggggcgggtggttctttggtttttctccagggaatgagaggcgccctctctggggggtaagagccttggatctgcctgtttcctcatcggtaaaagcaaggggtcaacaggatgaccccatccctccccaatccccttctcttcttgccggcgctatgacccctggggagcccctgcccccaggcctggcagcccccagggaccctcctactggggcctgccacggtggggggacaatgtttcccattttctgcggagccccccaactctcacctccaggcagaggtgaggtgatgaggggctggaggaggctccccctccaattccatccttgggaaatgccaccctctcacctcctggcgcccagggagttcagtaataacagaaacgttttgtttggttttgcttaaagcgagcaggagggagagcgcgaagccaacggctcctgcccagcccaattgtggggatttaccatggaggcgattactgagcggaactgcgggcggctctgctcggagggtcccgtgcttgttagggaggtgggagaaacagcaattacagctgttagcaccgaggggaggggaggagggggaaggagaaacggaggaagcagaggagaggggagcagggagaaggaagaaggaagagtggatgggggagggagaggaggctggaagggaggaggggagggctggaaggagaagggggagtagaaggaaggaaagggaggagccaggagggagactaggaatgggaggaggggggaagagggagaggaggagggggaaggaggggggaagggggaaggaaagtagaggagggggtaggaggagtgggaagaatggggaaggatggggaggagggagaagggggagtagaagggggaaggatggggagggaggggagaggaggagtgggaagaatggggaaggatggggaggaggggcaggaagggggaggagggagaggaggaggaggatggaggaggagtggggaggaagagggagggtgaggaggagggagaggaggaaggaaatggaggaggagtggggaggaagggggaggatgggggaggagggagaggaggagggagatggaggaggagggggaggaagggggaggatggggaggagggagaggaggaggaggatggaggaggagggggaggacgaggtaggaggatcctcacccttcaagagcatcaagttttcctccccagtgggagaagctgaggcccagagagaagtctctgctctgacaccccacaagagctttcccaaccaacaggcccctctgggactccctctatgccctgcccagggccccacagggctcgctctgcttcctgctctcttgctgcaggcctggagctgggaggtgggcaggtgatggccagagcaggaggcggctggccccttcccctgtccgctgcctcaaatgattaaccagtgcggctggagtgaggagtggacactgggagccggttcctcaaataccctccacacctttgaccggcgcatgggccagaacgggggacccctccagctcaggctgaagagctcccccaactgccgggtccagagggtcctgcgctccctgggatcgcccgaagggctgggtcggagggggaccctggcgcagggaacgttctctgtaactgagatccgcgtttctactcaggagctcagctgagactctctgcgtggccaaccctctccagagaccggctccaccgccagccagattggatgctgagcgtgtccacacagcacgcactcactgggactcagcgtgctgggactcagctccccgccgcccagtccctcgggcctaggtcagctcgccagctggtggcctgaggcagatctcaggacctccctgtgcctcagtttcctcacctgaaaaatgggaataattggagttgcttcctcagagtacccctgcccctagctccctgcaggtacagtggggatggggcaggagatagagcggggacctgcaggacgtacccctcccccagggaatgggggacgccaccccacccctggcgagcccggaaggtggctgctgattgaacaatgggagaaacaagctttcttctagcgcaaggtgactcacctgctggcccagggacaaagctcccccagccactccccaccgcccgccaccccccaccgcccgccacacacacacacacacacacatacacacacacacaccgcacagcacggagagggggtgagtcattccaccccaccacatctgtgatggcctccctgggtgcgtactaacctgtggggtggggggattatactaagggccgcccgggaccctccctgcttggcctcacagccagggagagaaggcccaaccacccccagcctggcattcaaggcctggctttgaacacatgccccccccccacacaccccagcttcattcagttttatctcattgactcattcaacaaacattccctaatgaagtcctgtgagggccccgaaactgggctaacgccagacgcctccccagccccaccgcctcttcctcagatgacaaggagtcttttcgtccttccattggcctacctgacttggactcctacacatcctacaaaacccaacctcagggctcctcctccaggaagggaggactgccgcctccccagttctgatctcagggggatggggatgacttttcccctccctaagtatgggagccccagcgggagggacagaggctgtggccgcagctctagggtggtgggggcaggggagcaggagtgatctgagaagtttgctaaatccagcgaatggcctggttcccctcccccatccccggtctgcagattctgcctaaggaggtgcgaatcccttcccctttccccattccccattccccagtccaacaccccctccccacccagaggtccacgaggcgagacagacccaaagagagaggcaaggacgtgggcgttggtcggtcttgcggggaggaggtgccgtgctctccccacttcctgacccagcagaaagcgcccgggcgtgtccagataaaccgcgccttaatcgaggcgccattccggcccggaacaggccaggcccaggtgaggctcagagccagatgcgcccagcctaacccacctggggacgcccctcggaccctcccggggcggggtcctcactcccgaccaggacctctgtctctgcatctgcgaagtgggcgcccccaggcctgtgctccccccacccacctgtcgtctcgtctcggctttcagggtgcagagtggacactcccaggtgtccaagccggcgagctcgggtcccgcagaaccggcggccctggagacgccccgagggcagccccgctgcagccttgctcgggtcccctagcccggcgcctccgcaaaccaacccaccgcgggccgccgagccccgctccgggatccgccggctgcctccatcccagaagagtgcgcagagaattaaatctagatatttacatgtttaatggctaaaggagcctgtcttctggcagggcagggagggcgctcaggtggtttaactcagcgccgggatcccgctcagctgcgggggccgcgaaccccgccgctgggccgacgattgggcccctccggagcgcggcgcccaacgcgggtttcgttgcgtcggggaagtccgtggcctgcagcgtccagtccccaggctgtcagccgagccctggagtggggcgttctccaggcccccaacccctgatccaggccgttcccctcccgcgcaccctccggcgggggctgcagcccgcgcccctcgccgccaagccccattttcccacagtgcaaactgcagcaaacgaactggttttctcctgagcgcacgctgcggggagacgattccaacggcgtccagtgaggaggggcccaggcctgcgagacggggcgcgttcctgtccccagacccctccggctgcgcctcaacccccagcccggctctctgacctgcatcggtcgggccgggcacagaggaggcaaagcaggcggaggccgcgagaggagagcagcctgacctcccgcctgagcccggacccttcccctcgggcaccctcggacgcccccgccccagcgtgttactttctagatggggaaactgaggcgcggccagggcgatgcggcggaagtcccgcgcccggccgtctcccgcgcctgccagacagagccccgagaagagggcatagaattccctcctctaattgtgtcccagaactctgggacgacggaggccaagctgctgagggaggggacgaggacgcggggccccagggaccaacccctccgctccccggccagccgcggccgcccagcctcggtgccccggcgcaaacaagcgcggtgtttgccgagcgcgaggcgggcggcgcggcccgagagcgatgaggattcgatggagccgctcgccgcggcgggggcaacggagcccgggcgggcgcggggatcgatcgggcacagctgtcgcctaagagcccgcgggagcatccacccgcgggccagagctgcccgggcgccccgcaactgcgggcaggaaatccgggacgtcgggcccgccaggggcgaaaccccaaagtcgcgacacccggggtggggaggtcaggacgtccccacggccaacgtggaaccttcgggagccgcgcgctcagcctcgccgggacccccgccaggccgtaaaagcccagagtctccccccaaatctaaataaaatccccagaccccgcccgaacgaaggcggctggagtccagagggagaactcctgccacacactaggcaccggcggccgggatttggggcgcccgcaggtttcgggggccgggagtgggagcagagcggatctagggctgcggctgggcttgggtggggcgcgcattcattgccatcgtttagtaaaacctcgctttaataaaagcagggaggggtgcgcagagcccggacactttcatttcggtgggagacaaatcgaatcagaaagtcagttgggggcgcactgtgcagggttctgggggagccccaggaaaggaaaacttgaggtatctgactctgcctttgatatttttagctgcaatgggagagtcaataacaacagggaaggtggtgtgtccaaaaatgggggaggtgtggaggattaaagagggggttcaagcttagggggtccgtttagggagtttgaagccgtggagagtgcgcacccctggggcatgggtggaggcccccagtcctcccctccacccgcgggactctccaagccctgaggttggcaggaccagaggctgccctttttgactcctcccagacgcaggccaggcacagagagggtgagcgttggtctggggcagcccagcacctgctgaggtccccctccccaactcccagacacagactcgggctctgggagtcaaactttcatcttcctggaggggatactgaggccagagagcttcctcgaggtggctgaggtccctgtggggtggggaagggggacttcttgtcccgatccagcccacccctccccctgcccacaatttgcctaatgacccaggatcgatctgggcctgggcagccagcctacccggtggccggctcaattctattttactaattactaaaaggctgctgctggtggggagaagcaagctgggggctccagggggccacagtccctctcttggggccagcaaaattctgttcaatctctcaacgggaccacagcctctacaaggagtgagatccccatccctgggggagtccaagtgtccatcagccgaagggaggggtgaggggcttcgcagacctggatagggttaggtccaccaggctgggctgccccttccaagtctagggagctttggaaggggtctgtggccaccttagcgtgtcctgaggcagcagaggggagaggccctcttcctctcggagtccctgaccctcgtcttctctttcaaaatggatgctttccctgctagaaaagccacacacgcttgctattaaaatgaacacgatcatcaagctgtaaaaaatatatttaaaaggaagcctgcaaaatcccagctccctaggagctcccccacattggcatttgggggaacttccttccaccttgttatcctcccacccgtagagacccccagcccccacctggtctgcgcttcttgagcctgggatgctagcgttttatggcggctgattgatttttagatctcacgattatttttaattatctgtgattgttggagggtgagaatgaggagcgcaggctggggctctgtgcagccacatcccccccgccgagattcagcatctgcacggggagtggggtacgcgactgttcggacctgcccctctcttcccacctggaagatgggtgtaattatgtaaactccagaaattatacctgaaccctggaactggaaagtttagggaccgacacttcagggggcaggagttagcacttgggcagatgtaggaatgaaggggggaactctagggccaccacccccccaccttgggccagagacacccggaaaaattgtgatttgacttccccctctctggggctgagagaggagagtatgcctggtaaataacaggcacttactaaatgccgagccctaagcagcgagtactaacaggggtccccttcagccctatccctccccaggacttggatcaggccacctcaggctgggggcccagatcattcaggccccctctctctctggctgttgtggtcagcatagactcacctccggctcccagctgggcaggctggagggcaccccctcccacaccagagaaggggaaactgaggcacagaaagggccctattccagagccaacctagtcttggttcagaaaatcgcatctccaatgtgtagccacgtctacaggggccaggaaatctggatgcaggtgcaaagctggggccggggtttgcccagaaggtttgcaccaaaggggaagtgacagcctgactgtgtcctcccctcttccttcagctttgagccctgatgcaaccctctgagatgggggtaactgggggctcccgcgaaccgactgcctgacccatccccttcctcttctagaaagtgcacaagcgttaccccgggggtggggggggcagaggcaacggggaagcaggaaggggctgaggctggttttggactctgcaccgtagcctctggcctacaagacagagcatcctctagattctggtctggcccctccagatccgcagccctgaccttaccccactggcgggatctagtcccctgggggtctctctgattataggagcccttcccccatctatcccagttcccaggggcccctggggctcacctgtctccaggtgctgagaaaaaggagacccctgcctccccccacattgaagagaagccccagggacaaagaggagtttgcaccagcgacgtctcagaagacaggggatccagcctcagcctccgtgggctggagggtgacaggggctcttagtggtcacccccaggctccagtgcctccagcggccgcactgtaaaaaggccctgcaattagaaggggcctttggcaaccccgaggccgggcagcccattgtacagttggggaaacggaggcccaggtgcccacacatgggcagaggctgacccctggggcgcacggaggccctgacctagccttaggacctcccttttcccccacttcctccacaaagaggttgtgggaagggggctgtgactccgtaggtgtgagtgggagtcgggggaagctgagcttgcagtggggatctagctcctgggggtctgtagggaacggggggggggggggacacgtacattacaggcgaccgtccagccacactcccagaaactccctggagatggacttgggggtgccaggcagaaagccacatctgggactctggagagaatcacacagagacgcgaaatcggagactctgggtcgaggcccccagccccacctgggcagagtctgtcctcggacccccgcccgctgtcccccgggtacggcctgccccagcgggcgcgggcgggcgcagtggccagggacgccgaagccccaagtctggccgacttcggcctgcttggtgctcgagtggggccggggcgggcggagagcgaggctgcgggaggcagcggtggcaggagcgggtgggcgggggcgctgacgtcagacccgggcccgggcgccggcggccgctcccctgccacatcctggtggccgcgctcgcagccgggccgggccgtgcgccgcgcagcctggcagcctcgcgcgcagccaccggggagcgggcgggagtcatgcagcggccttgagcactaggggccggcgctgaggagcgcgcgcggcgggagggcagccgagcatggagctgagcctggagagcctggggggcctgcacagcgtggcccacgcgcaggcgggcgagctgctgagcccgggccacgcgcgctcggcggcggcgcagcaccgcggcctggtggcgcccgggcgcccgggcctggtggccggcatggcgagcctgctggacggcggcggcggcggcggcggtgggggcgccgggggcgcgggcggcgcgggcagcgcgggcggcggcgcggacttccgcggggaactggcgggcccgctgcacccggcaatgggcatggcctgcgaggcgccgggcctgggcggcacctacacgacgctcacgcccctgcagcacctgccgccgctcgcggccgtggccgacaagttccaccagcacgcggcggccgcggccgtggccggggcgcacggcggccatccccacgcgcacccgcacccggcggccgcgccgcccccgccacccccgccgcagcgtctggcggccagcgtgagcggcagcttcaccctcatgcgcgacgagcgggcggcgctcgcctccgtgggccacctctacggaccctacggcaaggagctgcccgccatggggtcgccgctgtcgccgctgcccaacgcgctgccgcccgcgctgcacggcgccccgcagcccccgccgccgccaccacccccgccgctggccgcctacggcccgccaggccacctggctggggacaagctgctgccgcccgccgccttcgagccgcacgccgcgctgctgggacgcgcggaggacgcactggcccgcgggctgcccggaggcggcggcggcacaggcagcggcggagcgggcagcgggagcgccgcggggctgctggcgccgctgggcgggctggcggcggccggggcgcacgggccgcacgggggaggcggcggccccggcgggagcggcggcggccccagcgcgggcgcagcggccgaggagatcaacaccaaggaggtggcgcagcgcatcacggcggagctgaagcgctacagcatcccgcaggcaatcttcgcgcagcggatcctgtgtcgctctcagggcacgctctccgacctgctgcgcaaccccaagccgtggagcaagctcaaatccggccgcgagaccttccgcaggatgtggaagtggctgcaggagccagagttccagcgcatgtcggcgctgcgcttggcaggtaggagcgtggcgcgcagggccagaccctgggggcgccggctctggactcccgagcacctagcggggcggcggccgatgcccggggccagcgccccaagccccgcccgtgcgccccggcagcccgggaccccctatcaggaagctagaccgcgatccgcgccgctgcccgtttgtaccgttgccaaaagggagaaagggattgtgccgcctccccgccccccggtcgccgcttctgcccctttcgggagcgcgtaggggttctctagtccttgttagactgctgggaggctccgagcctctccccaagcagccctcagggaagctcattgtgtgtgtgcgtgtgtgtgtgtgagcgcgcgcctgttggggggagctgtgtccccgaacgagctgctgttgtcggctaaggtgccactcccctcctccagagtgggtggagaggggctgttgagcccccagccccgggccacagagctccgagacgttgcggcgggcgcctgcagctcagcagcagaggccgagcccgcgctcatccccccacctgccccagcgcgcgcttctttgtagttcggccccgcgatcgataccccctccctctcccctccggccgctggcaaaggtcacccgagaatggcgggggaggggcggccccggggaccctcggcccgcgccgcccggaggccttcacaccccgacccggcgcccgccccgcgcagtttggtcgtggctcgggtgcgcgcgcccctgcccgcctggctttggggttttgtgtctctcatgtccacttctctcctctctcggtcggaacacactggtatctctatgtttttctcttgctctccgttttgctcttgttcctgctcattatctcttctccctgtcggtctctccgcctctgtctctgtctcatactcagccaccggccccctggggaccctcctccctcctccctcccagctgacaacagctaagtccacacctgccctctgacaggcagcccggccaggcccccatttcctaggtgggggtgtaagggtgcaggagggcccctggcctaggtgggggtttctttccctggtggtgctggggagggggctgtccacccgggccacagggacaatagccgcggcggctggcgcctgatcgatcgcttctccgagcacaagggcgagaaaggcgggggctctgggaggcgccccactagcaaagaggcagaggggcttgcggctgtgcccccaggcagcccgtccaggcaggggggctgggcgaagagaggacagcggggtgtcctgtgctgttcctccctagaaagccattccctccctccaccccaggaggaccagacaaccccctgggagcctggacccacaggccggcctcagtttcccccttctgcagagcaagcaaggtgactagctggaacctcttatgggattcttagatttttctgctttggggcacgggaaaataaatagtctttcgcgtgtggcagggtaaccttgtgctcagggaggtccgggaacctggacgatttcagtctgtcctgctcccctccccatgacacatacagcggcactcgtgcgctcaccatagaccggcggtcatatccgcacacagccacggccctcgaggtgcagtgcgaggcctcaggtggcagagggcacacccctggcagctctatttatttattgagacggagtttcactcttgtcgcccaggctgtagtgtagtggtgcgatctcggctcactgcagcctctgcctcccaggttcaagcgattcttccgccttagcctcctgaatagctgggattacagacgcccgccaccacgcctggctattttttttttttttttttttttttgtatttttagtagagatggagtttcaccatgttggccaggctggtctcaaactcctgacctcaggtgatccgcccgcttctgcctcccaaagtgctgggattacacaggcttgagccaccccgccgggcctccctctgacgtttaaacaccaactggttgccatcacaccagtaaggcagggacagtttctatagcccgatacccaccacctcctgcctcctctctagcacatatttgggggacattgtgtccaccgtgggtgcacccagagtccacaccactctccatttttcccactgtcacgttatgtaactaatgacccattagcagtactggaattgcagatttgggggccacagaaaacatcagccagagcgtcacagaagggcaaaccgcaggcgagaagtcccatggggggggggtgggctccccgcagccgggtcagcagcacccagcacccgccctgagtggacaccgcctgcttcgcctgcacctgaccctgcacccaggtgggtgttcgctcctgccgaccccacagccatccaggcctccgccgtcccctttctgccacggggagagttgcagatggggaaacaggctccgtttgtgcctcgccttcctgacttgtgacaatgacaaacagtctcagctctgggagtctgggtttcctgtcgaggaagggagagttagaacagtcgccgtctcaggggtgcgtgggggaaccggaggggtgagcgcagctcctggcaccccgagcctcccgcagggcgctggggcgttgaggatgataaacccggaccacgctgcccgcctgctctctgccgggtccgctgcccacgccgtggccccgccgcgcggccccgcggccgcggggttcacgccgtcaaccttgcgcacctgtcgcgtctcaggtgccctgggggccgcgtctacaccaccggactccgcctggggcgtaagaggtggcgggggcgagggccgcggggtcactaggctccggcccaggcctttagttccggtcgctgcgcaaatgaaaagcggttaagtggcggcaaatcgcggcggttagggggagacggccggatgcgtccccatctccacctaacacggcgacgccccaacgctggtgctcggaaagggaactctgcccccgccccgcccccgcaccatttcaaccccgcagcagaggactcgccgccctttctactccggcatccccattccccgctccgcgagcaccgcgggcctccccaggcctcctccaaggagaactttgcgccccgggtctcccgtcgcgcttgcccggctcggggcgggccacgcgtttccgcaggtgccgagtgtcctgccgggcgccggggccaggacagagacggggacagggagggagaaagacccgcaggtgcagacggagagggagggggagacggggagatggagagagagggaggggtcgcgagacaaaaccagagagtggggagggagagaccgggagcgggagaaacagacggggagaagagaaaaagaagcccagaaaggaacagaggtgaaggagagacgaaaagagaggcagagagaccaaaaaaaaaaaaaaaagagagagagagagagagagacagagatgggagaggaactctgggtgctggaggctgcctctgtgtccacccccgccctcccacagccccctccttcttccccatggggtaggacttgggagaggggaataggtgttttccttgtttcaccaaagcacgcaagaaatcccaccgcagacctcggagtcccggccccactgcccgttctgcgtgcctcagtttacccatctgtaaaatgtgcgtgtggtgggccgaattctgggtctgacactgtcagattctggaccccgtcgtctgggagtcctgcagcccccaagcccattcccatggggctgggagcctcaccctacccccaccccatggtcctccgagtcccgcacttcggagctgcctcctggtcaaagctctcccctggcgccgtctccaacagtaattatgggagaggggctgggggaggggcgggcgggctcctcggcgggggtgggggcggtcgatgaattcgaattaccgtctctaattcatcaccgtcgccgggtcgatagcttcggccgtcttcaaatattgtttaaattgcaactccggaggaaaagtattttttgtaactgatcagaaaaaaaatacgtatatagataatacaaagttagatggaggtggttgaaagaagggcctcatctcctcctgtgggcaccatggggaggcaggagcccagaatccctgagggatggtggagcccagcatggaggaaactgaggcagggaggaccccccacccccaccccaggtggatgggatgctttgcccttaagcagaacgaagtgtcctagggacaaaaaccagagctgtgtatggagttgcatgctgagggcagctggtgcaggaattgggcacctctgtttggtggtgggtgagcaggggggatgccagggactggggacctgaggggaaggacatggaaaggaaaaagaggcagaacctcttccccacccaggctcatacaggccctccctccccggcttctcccccctacccgctgccaccatcaagggctgaggttgaaatgggcgaggcaatctgggagtcccccttaaagggacaggtgtccaccccccacaagcactctggaacccccacccaaactctggatgaaggggagggatgagcagggagaggaggaggaggaggagagggaagggagggaaggaaggggagagaggagagagggaaagacccctgtgccttttgcaaaaaccccactttccactgcaaggggtccacgcctcttacggacacccccagaaaaatatgccccacgccactagacagtagagataaccaaggttgggggcttggagacccgggccttccctgggctctgtccctggctgatccctggcaaaaggacttgagcctcagttttcttatctgagaaatgggcagaatgaaatgacgcctaggagagggggtatgaggggctggaggggctcaggggtctgaaggggccaccgtaggtttccacagggatgcacggagtgtggatagaccgagaccgtgcccagggccacgagaaccagacccacgtggggctgcgcgcgagactcaggtgactctggtgcccccacaccagcaccctcccacaaaacttcagggcccggggaggagcagccctagctagggacctgggccaggatcagggatcaggctcccgcctcccgtgcagagggggagggagatggggaggggtcccactggatgcccacagcccttcccctcctcctcagctcacctgcccggaacgacattttgaacccgatgcggttcccatgcccaccctacagaccagcaagctgaggccgaagagaaaggcgcttgccagagccccgcactgcttctgatgcggagtcagcttccgctaggaggggccgtaacaggaccagggcgtggctttcggctgctctgaccccgctgagtctggtgggcctaacactaggctggagatgcccaggctccctgacctccagcagagatgggggagcattccaggaaggtgacgcttcgggacgaagtcttggaggtgtattgaggtcaaggaccacagagaagggaccggcgggggggcggggggtggcactttccacgttctcagccacttggccgatcctcaggtggggccaggtgaccggccagttccacctccccaccccacaggagccacatcctttaggggtggtgaggcctgcgctgcgcttccccctgtgccccagctcctccaagtatgatgatgttgtgggcatgtgagtcctctcacctgggagaccaccggagactcccagagaggatgggcggtgggggggggccaggtcccagcctcatcgagtccagctcagagcccccaggaccatccccgcttttgcttttcccagcagacctccccctcccaacgccagcctcggtcccaataattcctttctgtagcctgggagacagggacgctcgcccccaacacagaggagtctgggggagtctcttgagtggtgaggggctggagctggcctttggctctgaagtcctcttagcctgaagtcctagaagtaatcatgaccattcattcttctctctgaatctccctcccattccgtgctgcttctccaacaaccattaccactctagtctaaaccactatggtggtctcctcctccacctccatcatggcttcccagctccattcctgctctttttttttttttttttttttttggagatggagttttgctcttgtcgtccaggctggagtgcagtggcgcaacctcggctcactgcaacctctgcctcccaggttcaagtgattctcctgcctcagcctaccaagtagctgagattacaggcatgagccaccacgcccagctaatttttgtgtttttagtagagaccgggtttcaccacgttgaccaggctggtctcaaattcctgacctcagatgatccacccacctcggccacccaaagtgctgggatgacaggcatgaaccaccgtgcccagccttctcctccttctcactgccgtctcccccacatcctaagggagctttgcatggccactttgggttggcaccccgggttggcaccctgccccgtggctccccagagccctaaaatataaatgtggtttcctgtggtggcctacagtgcctgaccctggcctcctgcgtggatgtgggaggggacttctggccggtgggaccagcagggacaaaggctgggaggtgggaaagtcctgagcagctgttaggagggaggctgagccgggcaggtagcccggcttacccgggagagctggcgctgggtggaatcaagttcttaattaaatatgggccctgatcaatagggagggaagcactggtggggtaggggagaggctgaacaaggagccagggagacccacctgaccttgggcagccttgggacacctacggcctcagttttccctctgccaagtaggtgctaatgtgagaggggctgagaaaccggcacccctcctgagtcccgagtgtgggcagatgtggggggcgatgggggacccctccgagctaccaagtcatgacctcagagccacagattcacagaagagagaaacaaagactggaagatgtgcctggcacaggctgctggagaggcgtgcccgggtcacaagtgtagacgcacccggagacacgtgtgtagacgcctccgttcacactgggacgagtgcagactgacccaggacccccatccgccctctggcagtcttgagccagcaactcccctaagtggggtgcggggacatctggaagacgccccatctccccctggacgcagtggctgcgccatctggagaccctcgtgctggctgctgggggtcctgcgtgccttccgcgcgcccccagctgcgcccgccagccctccaaccctcctgccctcctgccctcctgccctcctctctgggagtcgggacagaagctgctgggctctcctccctggagctggggctttgggaaggtcgagtagaccctcagtgagtgggatgcgcgagttggggacgctagttgcggggcagcaggggtccacgcatttccaagcgccctttcccgtccaaggacctgctggggggatgactgtgcctcagtttccatcacccagcaaacgccgtcccgcagcacccgggaagctgcggagtcgggctggggccgccgcgttgcgcacatcggtccttggcgggtgtgtggatcccagagcgcgcccggcccccaacagcctgacaggacctggacgcacgtgccccggcgccaggagacccgggacccgggaccacgcgcccgcggccttggagcctcagggtcactggtgcgggctccgcaggaaagcgcagcccccagcaggcacccaccatcccacccccgcatcccaccccaggggaaaccgcgccgcaccaggcgcgagtgttcttcttccttgtctggcgccccagaaccgcggccgtcctgggtgcgctcagctccagcgcagtgggaggacaagacacgttcctcctcccctcctccacctcccttgtttttgctccctggttccctaaaatattctacattcttttggcccggcggggaggctcaaacctgtagtcccagcactttgggaggccaaggcaagaggatctcttgaggccaggagttccagaccagcctgggcaatagggagaccgcatctctataaaaatgtttttaaattagccagatgtggccgggtgcggtggctcacgcctgtaatctcagcactttgggaggccgaggtgggtagatcatctgaggccaggagttcgagaccagcctggccaacacggcgaaaccccatgtctactaaaaatacaaaaattagccgggcgtggtggcacatgcctgcaatcccagctactccggaggctgcgacaggagaatcgcttgaacccaggaggcagaggttgcagtgagccgagattgcaccattgcactccggcagcctgggtgacagagtgagactccatctcaaaaaaaaaaaaaaaaaaaaaaaaaaaaaattagccagatgtggtggtgtacatctgtggccccggctactcaggaggctgagccaggaggatctcttgagcaagggaggtcgaggctgcagtgagacatgactgcgtcacttcattccagcctgggcaacacaggctgaccctgtctcaaaaaatgataaacaaataaataaatcgacatgattttacaatagttaacgcattcgccagtttccgaatttcaatgcaagatgaggtggcttccattgccctcccttctgcaaatcacagtctgtatttctccttcttgcaaaaggctgcgctccagggataaattctttttatttcccttttttgttttttttttttttttaacagaaaggggagcttcagatgctccgagattcttccccccggctcagatccgtgaagcgcgcatcctggtcatttttgccggccgcctagtactctctgactcggcggtggtttcaggttttcctgaaccacttccccgccccgctgacatttaggctgtttccaatcgttcgcggtcaccatagcggctgcaatgaatacgtccggggcggatcattttacgagtgtgagtttatctgtggattaatttcccaataattgaaacgctgggtcagcctccccagcccctttctgggtggccgcttcagccgcttcttatcactgattcctttcctgtcatctttttcaaatccatttcccactgcaggcgctgtgtctccgtaacattttttttaaaaatcaacgccttgtgcgtgcgtgtgtttgcccactggctttgctcctgtttgagggtgcctgaatggggtgggtctctgtagctgaatgtccgagggtgagaggtgccccctgacacccccatgcccccaccccatggcggcccagcctccagatggagccacgagggagggacagcccgagagtccaagtggaaatgcgtttcccggttaagtctttgaaggctcagaactaatttgaaaatgcagtcattaaaatcccatcaggggaggctggcggggaaagctggagggagaggggtggggacaagagggaggctgggcgcctgctgaggccaaggtgggctccgcgtgagatgtgggcagggcaggcatggggagggtaagccacccagagtggaggggtagtgggaacagagtggggccagatgaggggctggggaggcctctgggggtccacgcctggggcatgactcagccccatctccttggagaaggttccactgcctcccacccatgggaatcaattttccagctccccgaggggtgcagggtgtagacagagggtgtaggtatgtgacccgggccccccacagtaactggacatgtgaccttgggcaagtcacccactgactcgagtctggagaggccacgggggggggatgcgcaggggggacaagacaccagcatgggggtggggggcatcagtacaacccacatctggggcagggcagctggtggcggggacaggacgcgtcgccaaggaaaccggtcatcatcccagccggagaccgggctccatattgaattgtctgctccctgaagccagaggtggctgagggaggggatctccagctccaggacacagggaggacgggcacacagcggggtagactcacgtggcttggtggtttggggcactgtacagactgtcgggcacagagggacatgggatggtcacttgaatcgcccattgctgcatcctggggcgtcttcttctcccttgggcattgcccagctggtctccatctcctctagttgctctttgatctcctccctggaccttggggaccccccaggagcctccacatccctcccgtcctggtgccaccctggcttgtgtctctcctgccgtgccgcccccagcactgctggcgtccactgggattcagggaccttccctccagctgtcccgaagcctgggcctggtcttctggtccatcctccctcccagccagcagtgtatccactcgaaggcctcagagagcccagtggagcccgcgcctcccctccagtacccacccaaaggcgtcctctctccccctttcctggactcagagcggagctggcctcctcattggggaacagagtcccaggcagccgccgcttcacgctgtcctgtgactgtgagtggaggccagctcctggagctgcctctctctggcctcacgcagcagctgctccctgaatggtgaatggatgagtcggttgcaggtccgtgcttcggcgttcattccttcgtgactctcgggactgcggcccggtggggacacagggctctgggtcactgcgtccacttgataaaccaggaacctgatgtccagagaggccagggtgcgcgttcaaggccactcggcccgcagagcccacccgcgtccccatggctgcagtggtgaggggagcagggggaggcagagaggagcccaccctggggctgggcggacatggatgcgtaacccacaccgcaggcttctgcggggtgacacccagactcaccccaagaccctgcacaccctacagctctcacgtctcacgtccacaccgcgagccagctgcatcccacacagggatgtcacaccaagatccgttgcctcatccaccgcccgtccaaggccccacaagctgatgccggttttcccgcccagaactggaacagctttcctaacggtcacaggtttcttagcttctcacttgggtggggtttggatgtgcaaggctgccgacccccatcgtggttgagcgcccgtgcaggcgccacccacccacccacagcacctcgctcagacttcgccctccaccccgccgggacatttgggaagcctcaggcagccccacgcgggcacacccgatggtggacggaggctggcaccctcagcccgcacgcggccaacgtcaggcgcgcgcagaggcacccacgggcccgccttcaggggcgaggcggatgctgcatcctgaagccctccctgttacaagcccagcccctccaaaggcctctggatgaaggggaggatgaagggggagagaaggaggaggagggggagagggaaggaagggaagtgagggaaggaaggggaagaggggagggaggtaaagagagggagggaaggaaagggaggaaaagaaaagagcagagaggggagagggagggagggtgagtggaaaaggaggggtgaggaggaggagaggggatggtcccctcttggagggtgatgggggttgacaggtgggccccagcttgggttgcagcaatgactgaattcagggcccctactcagctactggcttcctgctgagggcactcggggagccccactgtcccacccggcgctccagggcagtggctactggtcttccgcagcagggtcttgcaggctgggctgagaccccccccccatgctccaccaccctcgtgtaggacaacccaggaacatgttagtcactgcacactcactcagccactgctatacctccgctctgtgctgggccacagaaagatctcaggccccacgaggctaaaaggaggaacagtggcccctgggagtcccagaggaggggccccgggctccgctgcggggggagggagggacttcctggggagaggccattgctcctgggcgttgaggaatgtgtaggagttctctggctggagtgacccaactttctactcttggccccagtttctccatttctcccctctccaggaagatcctgagagaaaacctgaggctcaaggccttccttgagggagggggaaacttcgtggttggaaggcaagtgtcgcccagagcccagctcctctcagggacccccagatgggagctgggagcctcttgttagccctgccgtattcattcaggacttttctggctagacccttccccacagcccaaccatgatcaagaccatcttacagttggggaaactgaggctaagatggtccaacaccaggcagggcccaagagggcagcaggtcagaccaccctcttgggccccggggtggttggctgtccccagcaacttttagaaaggcaggaagtgggatagagctggtgtgtgtgggccaaatcccaaggggtctgcaggaaacgccttcatccggaacttgagggtctccccccagtccagccccctttcccccgcatgagacacagcctacagcccccgccctttcctgggttggggcggggacggctgccctctgctggacacagcgggaacagcagggataactgagcgaaggggcggccacatccccgggacctccccgcccagagatttcctgatcccacctgcccagaaaagaaaacgacccttgttgatgctgggggcggcggcgcaggcccaggacggtgccctggggcgggaggctggatgctacagtaaagccaccatgactgcgtttgccgggctccctgtgcatgggctcagatgtgggcatggggtctccgtctcttctagttgatctctgatctcctcccagggccccggggacccccaggaaccagccccagatcctcctcatccttagattccaaaaagactgataaccgttggggagatgggatgggtggtgtacctggagtcctcagatcagagcctctcgggggtgattgctcctggaatcagggcctcagtccccagggtcctggaggaggtgcagggctggctgcatggagtgggcatcctgtcaggacccaaaccctcactcaatggggcccctggacagagcaggtgaattgttgtaaaaagaaggggtgtggcaggggtgacagggagagttgtgggattagacaaggggtgttggggtagcctcgcagggaaggagatacctgagcagagactagaaggagctgaggggggcgggaggggacttggggaagagcaaccaggcagagagaaccgtcgtgcaaaggagctgagtgagtgaggccagcgggggaggccagacagagaggcggctggtggtggatggggagagggaagcggctggaagagctcaggagcccaggaaggactggcctgcaccgggacatgcctgaagggggcgcactgtctttacaaaggaagggactgaggcctccaagggaatgggactcgcctggggtcccagagcaagcttgacagcctggccccgccccactcctccgccagcttggtggccaaggtctgtgttgggggccactctctatccccccgactacaggtcgggagctgctggtgatggaaccaggggctgagtatgcagtgctggccacatactaggagaatcccaggatggggttcagcagtgttgatgaggataatgaaggaaatcagggggaggtgaagaaaacagaggaagggggtgagtaaaagaaaggtcatggaggaggtgtggggaggtggaaggtggaggtgatggaggtggtgatgggggtggaaggtggagacgatggaggaggtggcggaggtagaggtggaggtggtggaggtggaggtggtggaggtggaggtggtggaggtgaaggtggaggaggtagaggtagaggtgctggaggtggaggtaatggaggtggaagtggaggtggaggtgatggtggaggtggtggaggtggaagtggaggtggaggtgacggtggaggtggtggagttgctggaggtggaggtggtggaagtggaggtggaggtgatggaggaggagatgctggaggtggaggtgatggagatggaggtggaggtcgtggcggtggaggtggtgaaggaagaggtgctggaggtggaggtgatggaggtggaggtggtgaaggaagaggtgatgaaggaggaggtggaggtgctggaggtggtggaggaggaggaggtgctggagttggaggtgatatggagggtgtgatgggatagcactgacattggtggtgcaggagtgatggtggaggagaggacggaggtggagacctcattggaggctggtggaggtcgcgtggcagaggtggcaatggtgggccctggcagcatgaggctggtggttggtaccagggccaagtccagggcttcacccccgtccccactctgaaccccatcagtccttctctccaagtctcagttttcacttctgcacaaggggtccataaccaccatggcctctgggttggcacaggggtggcctttaggattggtgtgggggtgaacctgatgttgggtggggtgctggcgggggtcaggtggcggtggtgatgggtaggggatgcacagagggggcatccaggcggcccccctactccaactcacacctctgtcagcggctgtgggggatgggagcaatgacaaagctgctcgcggtaaacagctccgactggatcgatctgggctgtgaggagctgtaattagattgaacgccgggaaggggggcagcagagcctctttttgctgcaatcgacaaaacgggaagttttttcagactctgcctggcccggcccctcccccagcctctgcctctggggtccccattaggcaccagattggagcctgggaggtggggtgggaaagggacgatatgcatcctacctccctcccccatctaggccagtggactctgttttctgggctgccctattgggactggctgggcaagcctgaggggtggctcacattctctgagtaaataaggagaaaaccccctgccttgtagaattattgtaaggattgaggctgggtactgtgattcatgcctgtaaccccagcactttgggaagctgaagctagaggattgcttgaacccaggagttagagaccagcctggacaacatagtgagaccacatttctacaaacaaacaaaaaacatatatatatgtttgtgggggttttttgttttttgttttttaattagccagatgtggtgatgtgcacccgtggtcccacctacttgggaggctgaggtggaaggattgcttgagcccaggagttcaaggatgcagtgagtcatgattgcaccactgcactccagcctgggcgacacagcaagaccctgtctcaaaacaaaacaagaattattgttaagaattgagtgaccagatacatataaagctcttgacacaaagctcttgtgagctttctgaggagcatttgtatttctgtccctactgtaaatgtaggataaatttgtgagtaaattgctaagtgaatgaataaatgagtgagtgaatgaattaaacattacaacaggtgagcgagaagggcctcccttggaatttcaaggccccggttgagttttgactcagctttccctttgaaagaatggaggactgggtcctctcctgtaatcctcatagggtggccgagtgccaaagaggtgagaggtcaattcagttttttgcatttccttccatgtttctttatgcagataaaatataaacataggttcttgtctctcctttcacacataaaaggctccctggtacactgttcacccttcaggatttcctttgccatctttccagattcatacccatactctccctctctgtcagtctctcaatataattacaaatacagtctgttgcctaaattaacatttagtaattaacattattacgcttttggaaaacattgtccacagctgagccatgtagagtactaggactgcatttcctttcctgtacaactctttggttttccaggagttgatagctgccaaacaaaaattcttcccacgctccccaacaaaatttaaaaccaactcaataggactttccacacatattaggtcatctctgatctgggtggggctgccctccataccctgggtccttttgtctagctgtcttccagggtccccctcatcctgatttggaggaccccttttctctttcagctaggttggatcacattttctgaatcccacaccatcctttttttatttacctcctcgtttgaatggaacacatcctccagtagctttctgagaaagggtatgtgggaagttaagttttggagtccttgaacatccgattatatctttattgcaccttcatgtttggtcttttgttatttagcaattctagctgaaaataacttttccttggaactttgaaagccttgctctgttgtctgctagtttttgcacacccaaagctgcttggattcttgatcctttgcatgacatctggctttcctctaggcgctttttaggattttctctttattcttggtgctctgaaatttcacaacaacgaggcttgagtgtctttttcattcaatgagctgaggacttgatgtcccacccccatttttttagagctggggtctcgctctgtcatccaggctggagtgcagtatcatgatcataactcactgcagccttgaccttctgggctcaaatgatcctcctacctcagcatcctgaataactgggaccacaggtgtgagtcaccatgcctggctaattttaaattttttgtagcaatggggtctcactatattctccaagctgctctcaacctcttgggctcaagtgatcctcccacctcagcctcccaaagtgctgggattagaggcatgagccacttcatccagcctatttagttattatttatttatttatttatttatttatttatttatttatttttgagacggagtctcgctctgttgcccaggctggagtgagtggtgtgatctcagctcacacctctgcttactgggttcaagcgactctcctgcctcagcctccccagtagctgggattccaagcacctgccaccacactcagctaattttttttgtattttttgtggagacagagtttcatcatgttgaccaggctggtctcgaactcctgacctcaagcgatccacctaccttggcctcccaaagtgctgggattacaagaatgagccaccatgcccagtgggcctatttatatttaaaaattatttattttaaaagagagtcttactctgtcacccaggctggagtgcagtggtgagatcatgctcactgtagccttgaacccccagcctcaagtgttcctcctgcctcagcctcccaaaatgctgagattacaggcatgagccactgcacctgaccacatttaaactggaaactcatctttcaacgctagattttttttcattatttgatcatctcttcctctatttttgaactgtctcttgatcaggtgacaaccctgcttcatcttaattcatcctctaactttttattctctttcatttcccatctttgcagctgcttgtgttccattttctgggatatctgctttactcttttttttttttttttttttttttgagatggagtttcactcttgttgcccaggctgaaatgcaatggcacgatcttggctcaccacaacttctgcctcccagattcaagcaattctcctgcctcagcctcccgagtagctgggattacaggcatgcaccaccacgtccagctaattttttttttttttttttttttttagtagagacagg[148 bp omitted]ttttactctggctgttatatattcacattttaagagcatttcctcactctctaatggtcccttttacttaacagcatcctgtacttgtttcatggatacgatatttttctcttactcctctgggaatattaattatagctttgcctgccttgtcggttccttctgagtttattcctcccccaccaaaccatttttctccattgttctcccccctcctgcctccctccctctctctctctccctctctttttcatgttagacgcttttctaaaatgtgcagtaacccacaggcatcacttgcatttaatcataaaacctgaaaccgcagttagaagccccacacattccaggtcagagggagtgaagtgtgcgtcagctcacaccctagacgggtgaacctgttgtccccgagacatgagtcatggcagaaggaacattcatttatttctgtggacgtgtatggacattgatctagcatgtcatgttccaggctgttctgcaacgaaaagaaaagctctctgtgccattccagtaggccacgacggctggcacagagaagagactgggagcagagacccactagtactacctgcaccaccggccacttctgggggtcacagagtagctggaactccgggatggagacaagggcaggacagcctcttcagcaccacagtcccagtctggatgcaggagagaaattgagattctgatggagtttcaagctgatgccacaaatgagcccatctgacttgtggcccagctcctagtgggggaagcctgtgttttgtacccactgacacccactgcattgaggggaggggttcacttcgctgctggagcaggaagagcaggactcggcttcagccctgccccatcaccccgagcctttgcttttctcccctttgcaagtgtctggtctgcaggccatggggcagcctccttcagccctctccgtgatctgtgcgggctgaccaagaggaagggtgacctgctcatctgggagaggaagaggtggtccctgcactctcccctcctcctccaaagtcttctttcttagatgttctgcgctccagagggtccactgggtgctcgagggaggccaagtctgggtggtctcagcctgtggataggggcaggagcaggaggcagggattcagatgtcggaattgggctgtggactcacagggtccctaagggtatcaggccttacaggagtgtcgctgctgctcattcgtagagcttggttgtcacagccagttgccatggcacacacctgtaatcccagtgctttgggaggctgaggccagaggatcacttgaggccaggcgttcgagaccagcctgggcaacatagcaagacttcccctccgcaaaaaaaaaaaagaaaagaaagaaaggaaaggccctggttagcccaccatttctggggaaggctgctgggttttgtgatgcaccccaggacctagtaattaaccagttatttcacccaagtctacactgagccaaaaactctcatgtgcagtttccatgtcatttccccaacacccccaggttggggctgcagaaaggagaggagaaagttaccaatatcaatttctgtggtcctttaggtagggagcgtttgagggtaggacggggtttggggggtatgaggcttggggggtgcctgagtgggctccatggagaagggggctggagggggtggtagccatgcctgcagaggggcactcacactgtgtccccttctttgtcctccccccacccccaccgcatctgctttccctgcctgtcctcgccttccattctgtctccaccgccctctggctgcatcctggactttcctgttgtctccctgttgaccttgctgtttccctgtctctgtctctgtgcgtccctgtgttccccgctgtctccccctccgcctctccctgcattcttgttgcttctgggctctccctgggaccttatgtgcattcgcctttccccaacgtgtcccttctcccctcctcctcatcctccgggcggcgtgcgcctcctgcctctccccggccggccacacggtggcgctgtgtcccgctcgcccgcccgcccgccgctcgcccgcagcctgcaagcgcaaggaacaggagcagcagaaggagcgcgccctgcagcccaagaagcagcgcctggtgttcaccgacctgcagcgacgcacgctgatcgccatcttcaaggagaacaagcggccgtccaaggagatgcaggtcaccatctcgcagcagctcggcttggagctcaacaccgtcagcaacttcttcatgaacgcgcggcgccgctgcatgaaccgctgggctgaggagcccagcacggcccccgggggccccgccggcgccacggccactttctccaaggcctgaggcgccccggccccgcgccctccctgcctccacggcctgggcgctgtgcccccacgtcacctccccacatcctgccggcccggagacccgcccccagggggcacctggagggggtgctatccgggccccccacacccggggagggggaagcagcacaccccccagcccaagtgcacaaaaagggccccccttcctccctccatgcccactccctccaggccaaaggaagccctccacccccccccggaggggagggagtgacagaaaggggtttcccagccccctctccattcaggacgcccagagggcctcgagaaaaaccagggctcactgtgttgtcccctaaagcgggtcaagaagcacatactagaaatataaaccgggtatttaaaaatggaattttaaagaataacccctcctccgtcagatcccctgccccaccgagggaggtagtagaaaacttccttcctccccacccgccccggccccctccccagggacctcagccctttccaaagtcgccaaaaacccacatcaagccggatccttacggtcccccaccctctccaaaaccaaccccacccgctggcaggacggcccctgcggccgagaactgagctgcccctctctgcggccaggattcctcgtgccaagaatcgcctgccttaaagtctggggaggggcctgcggcgggcgcccagcacctacgggcgagcacccttcccaccccatcccaggccgcaggggacggggggctcccacgtgcgggtaaattccagacgcccccgccccgccccgtctgttgagttcactttacctttaggcaccttcgtggagcgcaaggaaggacgcagctccggacacgggagaccacgcccaggctcccaggagaaggggacccggccggagaaggcgccgctggggccgcccggaggagcccctctgcacgggcccgtggagacgcttcctgcgtggaaccttctggaatccaccgcccccctttccgcccgcgtcagggtctgaactgggcttgcaggggggcagcggggttgaacgtggtgttggtttccactctcgccaaagagagaagacgccgaggaaggtggattccgcttgctccattttttgccaaaaatatttacaaatgggaagggtcggaaatgaagatgagcgcccccctcccaccccgcgctctcccccgctcctctcatctggtctgggtgacctccgagactggccggccgcgggatcccaggagcccgcctcctccgggggttcaagatccgagtctagaaggaacctcctccctgaaatccccccactcatcggctgcctcccagggaggaggcggcccccctaccccccttgaaaatgcaaaagacatttctagtgaaatgcccctcccctcccccaggtaaaggctacctcactcaagctcatgtctgtgattggaaaatcacgcctgataccaaagatttctcccaaggatttgtgctggatgacaggattccctggcctgggacccggctcggggccccgcctgccgagtgccaccccttcccgaacctgagagcgaaagagagagagagagagagggagagagagggagagaaagggagagagggagggagaggatcgtgaggtcgaagagtgccttcttcttgaaccaaagacgtgtatggagtgttctcttgtccttatcgacttgctctgctcccagctttccaagcgaccggatctgagtgatgcttctagaacatttgggtgttggggggttcccaatagtagaaagggtccccattcctgctcagcaccgcacctctctacccccccacagacacacatgcagacacacacatgcagacaacacgcagacacacacatgcaggcactcacatgcaggcccatgcacacacacgtgcacacacatgcagagacatgcagacacgcaggcacacatgcacacatgcaaagacacgcatgcaggcacacgcagacgcacacagagacacacatgcagatacacatgcacacacacatacacacactggcccctgtttttctgtggtgtcactgggtgccagcaactcggtatctcccacctcccactaaaacctgggccttaatttctctcccgtccccacccctaaattcctgatggatgaacctagagctgtcctgtccactccaggccggactgacgtagcctatgggcccagcaggtccagggcccacgttttaatttctttttaaaaagctttaggtcttgccgggcgcggtggttcacgcctggaatcccagcattttgggaggccgaggcgggtggatcacaaggtcagcagttcaagaccagcctgaccaacatggtgaaaccctgtctctactaaaaatacaaaaaaattagctgggcgaggtggcaggcacctgtaatcccagccacctgggaggctgaggcaggagaatctcttgaaactggaaggcagaggttgcagtgagccgagattgcgccactacactctagcctgggcaacgagagcaaaactccctctcaaaaaaaaaaaaaaaaaaaaaaactttaggtccaagaagatgcaccccattcaacataccatattatttgtctttataccaaggtagcctatagatatacaatgttttaaatttcttttttagaaacagggttttgctctgttacccaggctggagtgcagtggtgcaatcgtagctcactgcagcctcgaccacctgggctcaagtgatcctcctgcctcagcctcccagtagctggggccacaagcacaccccaccatgcccatttaattttttaagggatttcttgtagatatggggtctcactatgctgcccaggctggtcttgaactcctggccccaagggggtcctcctgcctcggcctccaaaagtgctaggattacaggtagatagacatttagtggaggaagaggctctcaaaggcaataaaatgcttctgatccaagagaatcacgctgcagccctggcccagtgagcttcttagaaaatcgatgcctgggcttcaggcactggccggagcacgggcctggcggggtgctgggtctcctagatgccctctgcttggccttcaaggccccaagggtaacacgctagggggcctccagttttgtcccctgctggaaatttaggacttggcttgggatcgttctggttgtggaatgttttagctatgctgaactgtggtcagatcaggtcaagcctcttggtcacagaagtggcccagcagcactttgggaggccgagacaggaggatcgcttgaggccaggagtttgagaccagcctgggcaacacagcaagaccccacttctacaaaaaaaaataaataaagtggcccaggactcctggatccttttcagatatcttcgtatcacacacacacacacacacacacacacacacacacacacacacacacccctacctgtttccggaccccaccccaaacttggccagacccccacagaaggctctatccccgacctgcccgccggcccctcaggccctctcctgcctccccgcatgcccacttggctgtcacataccaaagagcatgcgttctccatgcagggatcaacacctccagcacaattccttcgagcctttgacaattttctctgaaatacctcaaaatatttaatgtatagtttatgtgattaaaaaaaaatccttagctagtttttggaatacgtgacttgaagctttataccgttaaattataattttgcagacgatggcatgtcgtttctttgacgagttccgtgggagacgcattgaatgtcagggctggagaccagagggaaagttagagggagcgtgatcgcgagagagactgcggcagaaaggaccagtggcgtttacagatttcttatttaaatgagtcctttaggaaagaaaggaagagagagagagagcgagcgcaagagagagagagagggagagagagggagagggagagagagaggcagaggtatacctttctgttctctggcttgttctgtttcttgttttctggagtcatgtcttataagagtatttattattctctgtgttctgtgttcaaatgtaatttaagaaaaaaaaaggaagaaaaatgcaaaaaaaaaagacaaaatggaatttgagttggtgcatgactaatgtactctttcttgacgctaattgtaataaagtggtcagggtggggggcggggggcgtggcccggttccgtgtcgcatctgtgtgtctggtgcctgatcggtgctgttcagtggtttttcgttactgtttctttcctcctttctaaggaactgtgtccagccgggacaggtggacggggccccaggtagagggggcgggaacagagcctcagtagccgggtctcctccacctgcctgtccatctccacccgagatgccacctgcctgccccagccaggcgggagccaccgagcgtccccccctcagttcctggttcttgggggcactctggtgtcatcgatatcttagacccccccaaccccccatcacccggttgctttcactctagcatgaattcccaagtgtcttgttcagaggagacagacaatcagcctattcttgtcttgttgcccagggtggtgggggacgggagtgtgccccaacttcctgagatctgaaggaccctcctgagggccccaacagcaggcaccagcaccccctccccccccacctccacccagacagcctcggcctccctccctgggctgggcatgagtccgcctttctgtccagcccgggaggcagggggtgtacgcctgcagagacccctccctcccagcccactttcggagcctacagaacagaggactccccaaaatcatcaaagggggctctgggacaatgtcctctgcctctgactcctcttgtgccatgaggccacgtccctgagccatccccagatagtccctggaggtggaaaggggcacagatgtgccagcttgggaacagaggctggaggagagggcggcaggggagagatgagaggggccgcttttgggacaggccccagtaggggggggcggggtagctaaacggggtgcttctcaccccataaagcagcaagccctggtctggagggctgggcctggggctgagggctcagctgacctcaaatctgaaatgatgccggggccaggatgctccttgcaccagcaggagcttgggccatttcacattctctgccccaagcggtttaagcaaaatcaggccagtagactcctggggctcctcctcgtggccctgtcagaccacgcaggggctggttttggtggaatgagctcagccgggggtgacggaagagccaggaggccctgcggccttgagtgttttgaatagactggaactgagggctgctttcaggggagacaccacttggaccctccaaagtcccctcccctccagggacaggggagagaagcccttttccaccttcacccttgggcgacaggcttaaaagctaaaaaaaaaaaaaaatctcgtcattgttaaccattgctgtgctgggtttgttgatttgtttttcttcaataaattattttctagtcactcacctgggcgtgtgtgttagctgacgggtcgggcacagatagggggcgggaatggaactcgcccacctcgaggctggggagggaggaccggagtgcagggaagacggactttgcttccacccagctcgcccctctctgctctgagtcccgtcttcttcctgggccagtggccagctctgagcctccacaatccacacaactccaccacccacacaagtccaccacccacagggaatggtaagaatcagaaagaggccaggcgcggtggctcacacctgtaatcccagcactttgggaggccaaggcaggcggatcacgaggtcaggagatcaagaccatcctggctaacacggtgaaaccccgtctctactaaaaaatacaaaaaattagccaggcatggtggtgggcgcctgtattcccagctactcaggaggc[136 bp omitted]ttggcgccttagaaggaaaagcttggcgcctttgagtcaaccaagccccaagatgcacaccttgtcaggacctgcttctgtgacatcactgctcattgctttctggagtctaaagtgaacggaggccccagtgaatgaaggtgtatttgaatgggagaaaccagggcttcccgatagaggaagaagctagatggtacaagaactggaatttataaactttcttgggaggggccagctgtcaggcagcgggggagccacagcttttaataagcaacttttgagagcaatgaagctttacccacattatcttaccccagcatgaagaaggaaagttttccctgcaaatacccggctggaccactagaggtcagtgttttgattttaaaaaccgggaaggaatattccatcacaaaaaaagtgtagggaaagagggagcctgaattagcgctggggtcagatggaccctggtttattagaaaaagaaaagcatgtggagtccttgtctttagaggaaggccccctgcatgctggttgacttgcagcagaactggctggagcttcttcttcccaggaaggacatcttcctgatatgccagcgtgactcctttgggctcgaagatgcctcttcatcagatgggtctagggattcagatgctacgtcactgctgaaccctggtcccctccgcagagggcaatgactgctcctctgggggcaaggatagctgctcctccccgggcaccagcagccactccatggatgatgatgactgcttctccgcgggccacagctccacctccataggctgctcgctcgtggacgtggacgattcttccagacttggtggcagagtctccacctgagatttgtgggtcttgtctggaagtggcaccgtcccctccttgggggtgtgaggctccttttgccagctcttccggaacggtgtggagggcttcaaaaatgctgacttctcctccgaggagtctggctggctctccaacgtcagctggcctgaaagaaatgactggctccccagaggctgtggctggctctcaaatgacgacagctggctttctctgtgcaacagtgatttctcctgaaaagaatgtgacctctccttggtcaacagcaacttctcaggagaaggtggcctctgcttgggtgacaatgacctctcctgtgcccttggcaattgctcttggaaagactcagatagcctgttgctgctggtgagcacatatttggggagggcaggttggttttctggatgaagagcggattgtctatccatagaaaatgatgagctaggtgtaggggggagctgtacttcctgggaggacacctgcccctgtggctggtgcttcttcttccccaggaaggacatcttcctgaggtgtcactgtgactcttttgggctcgaagctgcctcttcatcagatgggtctagggattcagatgctatgtcactgctgacccctggtcccctccgcagaattgtgccctgagtgatgaggtttgcatatccctcacggtgggagaaagcatagctggaacggcgggcacgagactcccggtgtacatgaggcaagggctccatggtgaaaatctcctcgctggggccctcctccaccttctcctcctgaagagcaaaggggagagcaggggaagcagactcctatgcttggctgatggctctcaggtcccccaagtaggagaggcaggattcaaagcccttggccactattgattggctacgttcttccctacccaagttgagccaattagagtcctcgactctcagtgttgagttctaaggaggactctagtcctttgcttttcaagacccactaattggccttgccctggaaactaaccctggatcagccaatcagagttattccctgggacttaactcgggaccacccaatcagagtccttccctgggacttaaccctggctcagccaatcagagtccttccccgactctggaccagccaccaggtgccttggctgccctttggtggcaaatccaggagaggtgagcctgggacagccaggtgcccagcctgtgcagtaaaggtggcaggagctgggcagggagaacagaggtggcagggcaggtacaccattccagtcaattctggggcccatctcagctgcaacttgcttttccatgcatgctttggttacgtgggctagtaagtcccctcccttttttttgaggtggggtcttgctctgttgcccagataggagtgcagtggcaaaaatcatagctcactgcagcctcaacctcccaggctcaagcaagccacctgcttcagcctctcaaagtgctgggattacaggtgtgaaccgctgcgcctggccttgagcacatgtcctcaaggtgcatccacgctgtggcctgtgtcagagcctcactccttctcacggctcaggcgtgtttcattgcacagatggagcgtgccgtgttgacccactcatctgtcaacagactcttatttctaagttcctccttttgcctaaaccatttcaaggttgtttccgtcatctcaacccccaagctctagatcattcacggtagaatctgatggtgtcagccaggcacagtgtggctcatgcctgaaatcccaacatgttatgaggccaaggcaggaggattgcgtgagcccaggagtttgaaccagcctgggcaccataatgagtctccatctctagaaaataactacaaaattagctgggcgtggtggtacatgcccgtggtctcagctacttggaaagctgaggtgggaggatcctttgagcccggaaggtcgaggctgcagtgagccgagattgtgccactgcactccagcctgggtgacagcacaagacccttctcaaaaagtaaaaataaataaataaataaaaccttaagagcccgatggcatcagcactggaatccagggcggcgtttgggtgctctctgctgctttgtcgggggagtgaggtctcccttcttgggaaatcgggccccgggggcactgggcgtgtgtccggggctccgcacccacccttcccccaagcctagtgtcttggagggccgagaggggccgggacaccttgcagtccctacgccctgcacggctccccaaccagggtcctggaatgtaccagatgaggaccccaggcccaggcccacctcaccttggcacgtagctccttgagggctgggaagatgactcggagggccaggacagggaaggtgtttatggacacactcagcaggaccaccagcaggatggagggagaggacatcacgctgaggtcggcatctggggacagggcggggtcacagcagagcctacccccagctccaaggatgcccccaggctagggagcgccttggtgcctttgtgcctggtccataaaggagcgccttccccaggacactttgccggacgactgtcatgagcaacctgcaacctcttccatcggggctcccctgcaccacgaccgcccgtcccacttccccatgggggctcacacagaaacgggaaggtcgtgggggatactctgaagagccagaagctctgggtggtggtagtcatgatggcgtagaaaccaaggctgaggaggatggtcgccacgcacagggcggtccagtacttgatgataagaatgacctggacaggcagcggtggggtaaatccggggcctagcggggcttgcaccaggacaccagcccctggggtccaggaagggcacctggcaatgcccccaaagcaggggtccccaggggaggaggcctccataggccatgtccaaggccccggggaggtgaggaccttgcccacctccatggtgatggacagcaggcaagacagggccaccacgaccgcaaaggactggtggtcgctgaagctggcgggtcccgccgtgtcgcggctgatccacagtgtcatgaagaagttgaccagagaggtggtcacaccatgggcgatggcttggacgaagacccagtagttgaagagctcgtccttctgccccaccacgtacagctccggcttctccaggctctgctctgcgctcacgtccttggggcaagcagaagctcttgggattgggtggggggcgggggacacccaacagagatcaggatctcctcgggcaggccagtagggtggccactctctgtgtgtggctctttgagtttaagtgagttaaaataaagtaaggccaggcacggtggcacacgcctgtaatctcagcactttaggaggtcaaggtgggaggatcgcttaaggccaggagtttgagaccagcctggacaacatagtgaaaccccccatctccaaaaaaaccttttaaaggagctgggtgtggtggtgcgcacctgtaatcccatctacttgggcggctgaggcaggaggatcatttgagcccaggagtggaggctgcagtgagctgtgatcgcaccactgcactccagcctgggtgagagaatgggacctcgtctacagaataaaataaaatgaaatggaaagagctctggaggttggtcacttggccacacgaacgcactaggtgatgctgggctgtgcgcatgagtctggctgaga[139 bp omitted]ctggccaacatggcgaaatcctgtctctactaaaaataaaaaaattagccgggcatggtggtgcacgcctgtaatcccagctactcaggaggctgaggca[135 bp omitted]gtaaaatccagtccctgggtcacaccagccgcaacacaagcgttcctcatgggcacgtatggctgctggcttctgtgttggattgcatagctgtgggacacttccatcatctggaacgttccatgtgacccaccctcccaaccccagatcacgtagccagggcctcttggagctgggggatgataaacctagcagagtcatctgctctgatcctctctccccattgcatggatgggtagacagaggcacgggggctccagcacagggtgggggctcccacacacaggaggagctggatggccccgggatgagcgtaggctccggtgggagaaggtcaatggcagtgggcagggagaggtactggactgcaccccctgagccccaccccatggcctgaaggtctcccaggctccctctccccgccccaaggagcggaggagaggaggagaggctaagcagagacctggaaggaagacccggccttgccctgctcacctgctcaaagagcccaatgtagagaactggcagggtgctgtacaggaggttgaaaagagccaggaaccatccttcatacaggggctgagccgggggagaagggcaaggagaacaagtcagcctccaggcacccaaggagcctgccaagcaggcacccagggagggttctgggtgaggtaactctggtcgagttacactcaaggttggggctgggactggggtggggtgaagtgcggcctgataaaggcggcaagataaagggagggaggaaagcatgatcaaattccctcataatggcacctctgagtttttgttttaattggatggcatcaaaaaaggatacaggctgggcacggtggctcacgcctataatctcagcactttggaaggccgaggcgggcagatcacttgaggtcaggagtttgatactagcctggccaacacggtgaaaccccgtctctactaaaaatataaaaagtagctgggcgtggtagcaggcgcctgtaatcccagctacttgggaggctgagacaggagaatcgcttgaacccaggagacggaggttgcagtgagccgagatcacactattgcactccagcctgggcaacaagtgtgaaactctgtctaaaaaaaaaaaaaaaaaaaaaaaaaaaaaaaaacgctgggtgcgattgctcatgcctgtaatcccagcactttgggaggctgagatgggcagatcacgaggtcaggagttcgagaccagcctggccaacatggcaaaaccctgtctctactaaaaatataaaaattagccaggcatggtggcaggtgtctgtaatctcagccactagaggggctgaggcaggaggatcacttgaacccgggaggcagaggttgcagtgagccaagatcatgccactgcacgacagcctgggcaacagagtgagactctgtctcaaaaggtaataataataaaaataaaacagaaaccaatatatacttactaaggggtttctgtaaagctccctctcaaatgcccaggtattagtgatgggagctcattccttctccaaggcacctgcttcccagcagtttccctacacgcagggaatagcactgccctggggctcctctagtccttgtcaggataccgctcagagtctggaccagagccccagctcccacaatcggatcttctctggggttcaaggtcttgttcactcaactctccccagaagaggaggtccatgtgcagtgcctgcccttgcttgaaagctctgagtgtgccgggcacggtggctcacgctgtaatcccagcactttgggaggccaaagtgagcaggtcacctgaggtcaggagttcgagaccagcctggccaacatggtgaaaccctgtctctgctaaaaatacaaaaattagccaggcgtgatggtacacgcctgtaatcccagctacttgggaggtggaggcaagagaatcacttgaacccgggaggcggaggctgcagtgagccgagatcgtgccattgcactccagcctgggtgacagagtgagactctgtctcaaaacaaaacaaaacgaaacaaatatcctggaaggtgttgggcacagagctagacagggaccgtcacctcccttcacctggactctaggcctccactaacgcagccttgccatgtggcctcaggcaagccctgtccaccgaggatcccagggttctcagtgcgtccagggctgctcctggcagctatgggaggggcagggcatccccagaggccctggtcatggggcagccagggtgggggacgcacctggccggtgaagccgttgtagcaggcaaaccagacctgcaccatcatgctggccatgctcttgtagaagaagtagcgcaggaacttgcagatccgcacgtaggaccagcggccgtgcaccagcaggaggcgctgcaggaagcagaactggccgagcacgaagtcgctgttctgaactgcctgcatgccctcctggcccgccagccccacgcccacgtccgcggctgcagggcacaagcagctggtcagccccccgcacgcccccagtcccgcccgcccccccagacccccgcactgttctgccccctatcagccccccccatctgcttcaggtccccccagtcccaccgccgcctccatcagcgcccccctcacctgccccaggtccccccagtcccaccaccgcctccgtcagccgccccccactcgtcccaggcacccccagccccgccgccgccacccactcttgatcatgttgatgtcgttggcaccgtccccgatggccagggtcaccacctggtggtacttcttgaccagggccacgatcagggccttctgcttgggcgtcacgcggcagcagatgaccgcctggcacttggacgccaggtccacgaaggcgcgctcctgcagcacctcggagctacggcgggctctggagtcctgggctggcggtgcagccagcgggagcccgaacctccggcacagcagggacaggcgcctggcgtagaggaaatccctcctggactggccgagctcctgccacgcctcgtccatgttcacgttctgcgccagggcgcgcggctccttccgcagggacaccagcagtttgtcctggccggcggggagggggctgtgccaggcgccgtggcctccaggccagactggaccctacccggccctcggcctcgccagcagtccccaccccgagcccgccgcccctccaggcccctccctggcgccgggaccccgccgtccaccctgagcgacactgaccaggaagtctccgttaatgaccaaggccagcttgacctgcgacagggactccctggttagaaggttgttactgttttcccagtaggtctccaggatgcggctgcggggcgcaggggtcagcggggcaggggagggggcgggcttctccccacttccccgggggctccactgcccctcccaccccttccactgcccactcccccacccctgccccttctcctccccacttccctcttcccctcccctttcctcctcctcccgccgctgcccctccccttcccctccactgcccactcccccacccctgcccctcccccttccctctctcctcccctctgcctcctctctcctcccctccccctccaccgcccactcccctccgctgctcccccctcccctccctctcccctccccctccctccactgcccctcccctcctccccactgcccccatccttcccctccactgcccactccctcacccctgcacctccccctcccctcccttccctctcccctcccctctcccctcccctcccttccctctcccctaccctctccctccactgcccacttcgccacccctgcccctccccctgccctcaccttccctccctcttccccctccctcctctgctcctccccctcctctgcctctccccttctccctccactgcccctcccccttccctccaagctccctccactccccattaccacactccttcctcctacccttccctcccctctcaatcccccccttcccactgtgccttgggctccccgtccagtgagacacgcacctgggtgctccttgtcctcacctccccactccccttgctcaccccccaactccccacttcttacctaatctccttctcctccagaatgagcatattctctgacagcagctcgcaggcgaagccgatgttcacagccgtttctgcgaagcagaccagctcagcgcctctgcgacccgccccgcactggctgcctgggggccacgcccactctgcccggtgaatcctggcccgaccaatggcagccacatgccccaccccctggccatggtgattggttcagagaagggcttgtaacccaggctcaccaatgagagccagccctgagattttggctgtagttctggccgggactgggctgcccagagatgtgtctgaggccaggatcagcaggcacatgtgcctaggatccacagtgccttcaggaacccacaaaatgtctcaatatctttttaaatcagaagggaaataattgaatatgtttccctgggctggctcctggccgacagagggcaccctgaaaatcactttttttttttttgacaagggctcactctgtcacccaggctggagggcagtggcgcaatcacggctcactgcagcctcaacctcctgggcataagcgagcctcctgcctcgtttctctggag[154 bp omitted]tctcctgcctcagcctcctgagtagctgggattacagatgcgcaccaccacacctggccaggcccatttttgtatttttagcagagacggggtttgaccatgttggccctgctggtctcgaacttctgacctcaagtgatccgcccgcctcggcctcccaaagtgctgggatgacaggtgtgagccttcaaacttcagggaagtttgaagacccatgctgcaggggcttagccacccggagctgcccgggactcaccctgcttgtccccggtgagcacccatattttgatgttgctcttcttgagacatttgatggtttcagggacaccgtcctggagtctgtcctcgatggctgtggctcccagcagctggtgggggaggagggcagggcggggaagatgctgagcagccgtccagctccctggcgggggcaggagagtcccagggcccccttgggtgcccccgctgcccacccaccctgaggtcctgctccatctcgttgtacacctgttgcagggcctgtgcccggttctgcagcaggaggctggcctcctggtggcgctgctgccagtcctcgtaaatgtcctcagccacctccctgtaggccaggcacagtgtccgcagggtctcctgggcaaaggcctgggggccgggcaggtggaagctgtcaccatgctgaagccgacatccgaggctcagccctccccaaccccctgccgggctccggagcctgggtcccccaaccaaaagcctgttgcctccccagccaacagcagccagaagggattcagaaaactggtctgaggccgggtacggtggctcacgcctgcaatcccagcactttgggaggctgaggcaggcggatcatttgaggccaggagtttgagaccaggttggccaacatggtgaaaccctgtctctacccaaaatacaaagattagccaggcatggtggtgggtgcctgtagtcccagctacttgagaggctgaggcaggagaattgcttgaacttgggaggcggaggttgcagcgagctgagatcacaccactgcactccagcctgggcgacaaagtgagactccatctcaaaaaaaaaaaaaaaaataga[132 bp omitted]gaaaccgcgtctccactcgaaacacataaaaaattagccaggtgtggtggcgcatgcctggaatcccagctactcaggaggctgaggtgggaggatccctcgaacctgggaggccgaggttgcagtgagctgagatcgccctatcgcactccagcctgagtatcagagcaagattctgtttcaaaaaaaaaaaaaaagaaaagaaaactgagctgcccctgctccccacctactctgtctcagacacctgctcccacccccagaccctcagctctcttttgcctccagaccttcttggaggactgtttccctgccaggaacaccttccctatgctttgcacagcaaattctttttttttttttttctcgggggtgggggatagggtctcactttgtcacccaggctggagtgcagtggcccaatcatagctcactgcagcctcgaactcctgggctcaagtgattctcctgtctctaccttccaaatagctgggatcataggcacatgccatcacacccggctaatttctttgtatatatatatattttttaaatagaggtggtttcaccatgttgcctgggctggtctcgaactccagagctcaagcaagctgcacacctgagcctcaaaacgctgagattacaggcagaagccaccacacctggcctgcatggcgaattctgactatcactcaagaccttctatgcagtccacccacccggtgccttccccagctggggctcccccagtcccaggcccctccctctgacccctcaactttggctctctgagccccttccttgggcccctcatttctcaagggccagacccagggttggggcctctaggggctgggaggaaactgggcaggcccagagagcaggcaccccaagggtggtcggggggtccccaaggaaggtgcccttacggcttcttaccccccgaccctgcccccagctttgtgctccaaggggtggccttaggtctcaaatttgtttatttatttatttttatttatttattttttg[131 bp omitted]ccaccacatctggctgattttgtagttttagtagagacagggtttcaccaggttggtcaggctggcctcgaactcctgacctcaaatgatctgcccgcctcccaaagcactgggattacaggcgtgagccatcgcgccagcctgtttattaagagacaggggtctcgccctgtcgcccaggctggagtgcagtggtgcgatcacagcttgctgtagcctccacctcctgcactcaagcgatcctcctgcctcaggctcccaaagtgctgggaccacaggcacgcgccaccatgtctgatttcccttttgttgttgatggggcacgggtccaagagcttgggcttgacacagcagaggagcttcacggacattggcagcctccgacaggccttgacccttcttccggcctcaatttacccatccattccctggggtggctgagctaagctgacctgctgagctcctgggctctaggtcattattgtgaccgcacttccagttcagagtgcccccacatcctggcagagcaggggacacaggacatcttcccacacacaccccgctgccctgtgctccatgctgctggggccccagcagaacctgtgaggagcccccaggctggacgcagaatcctctggccctgtagggtcagggctggaccagggggaggcagcctggggtgatgacagccccatgttggcagggggtggggcaggaaaggccccatgtgtggggagcttgtggctgagtcatgaggacaccgaaagcttctgaatgacaaaggtgcagggaagaccctcccagcacaggaaacagcatgtgcaaaggtgccaaggcagcacctgagagtggggaagtcacaagccagaaactgggtcctagggagtcccttggtgaggccaaagagagaccaggctggagaggtcagcaggggacagaaaaagcctcaaatcctgggccgaggagttcgggcttcccccacagagtgggaagctttggagcagacggagctgagtgtgtcctggcagctgggccagctcaaccgcacggtcgtcttgtgcaaatgagaaaaatacacccttggccgggcgcggtggcctacgcctgtaatcccagcactttgagagggcgaggcgggtggatcacctgaggtcacgagttggagaccagcctggcaacatggtgaaaccccatctctactaaaaatacaaaattggccgggcgtggtggcgggcgcctgtagtctcagctactcaggaggctgaggcaggaggatagcttaagcctgggaggcagaggttgcagtgactcaagattgcaccattgcactccagcctgggcaacagtgcaagactccctctcaaaaaagaaaaggcaggctgggcgcgatggctcatgtctgtaatcccagcactttgggaggccaagggggcagatcacctgaggtcaggagttcaagaccagcctggcccacatggcgaaaacccatctctactaaaaatattaaaattagctgggtgcactggcgtgtgcctgtaattccagctcctcgggaggctgaggcaggagaatcacttgaacccgggaggcggaggttgcagcgagccaagactgtgccactgcactccagcctgggcgacagagcaagactctgtctcaaagaaaagaaaagaaagacaagacaagaaaaagaaaaagacgctctctctctgggggctacacttgggagttcagctgcctcccagccggtgtgtgtgtgttttgtgtgttgccgggggagggtgttttgtacagtgcacaacatacctcactgtacatagccatcccaggtacctgcagccttccatttctccgtacagtctcctcccctgcctcctcctcctcctgtccctacacacacacacacacacacacacacacacacacacacacacacacacacacacacacacacataagccagccttcctgaagggactcacagccaaggcctcctctgtggcaaattccattgcccccctcctgtgcaagcgttcgaagatgaccgtgtcggcgcccttggtgtacaggcagatggcgccctctggctttcgaactgtgggggaacaggccctgctgcccacagaggctccccgtctgcccgccccaccttggggggcccagggcttgggtggcggggctcacccagcaccgacatccgtttgcgcgtgctgttgaagtccattatggccaggacctggtagacccgttcctcccccagctccatgatcgtgacggtgtcctgggtgcgggacaggaacacgtagccgaagttccgggctgcggtgaccagcgccccctcgtcgggggaggccgcctggtacaacagctggtctggtagggaggggggccattttggggtcacgtggtggagcccgtctccatctccacagtgcagggaggagatgggtatcgcctgggctacacctttattgatggtggccggggacccccgcctgtacaacccaatgcatggaggtgagcacttgagactagacgaccttcccgctcaacaacagatcctcgggctccgaccgcaggcctggacatcctttagccctgacgatgacacgtccgccctcccgccacgatgcttgtcagcactgtctgggctccaggcccggacgccctcgaggtgcggctggtgtcacaccggcctcagcgccccccaagccagctgaaagccctggaagatgggccgggtgagctgcggggctggggacactgccgtgccccgggggctgagcggcctcagagatggggaggtgggtgggcgcacctgggcgctcacgggggctctcccgcaccatcaccgtgtggcagatggccagcaggcgccagaactcccgcacggcctcgtccccgttggtccgcacgaggtgcagcagggccgcattgtggaagagcagcttcccgtcggcgaacttgttccagaggtaggggttctcctgggggtggcgggggcacgggccggctgtgggtgggccgctccccgtgccccgtccccctcaccgtcccgcgctgcaagccaggcaggctcaccttaggtcgggtcgtggcctctgaatccggccctggggaaagacacagcttcctgcttcagctcccacaggccccccattcgggatcccatagcccctgacccctagtttcaggcttccgggggccactggtgcagccacacaagccaggcctgtggccctggaaccgacaccccgagcaatcttggggcgaaagctgacctcagtttccaccacctgcagaaagcggggaagaggggagcacacccatcctgtctcccagggaccccaaaaggacagcctggagccggatgcggccccgtcccgtctcccagggaccccaaaaggacagcctggagcgggatgcgggctagggaccccaaaaggacagcctggagcgggatgtggccccttcctgtctcccagggaccccaaaaggacagcctggagcgggatgcagccccatccgtgggacacactttgtttcctcctcctggggtttttgttcttttttatttttatttatttatttatttatttatttatttatttatttatttatttttgagacagagtcctgctctgtcgcccagactggagtgcagtggcacaagctcagctcactgcaacctcagcctcctgggttcaagtgactctcctgtctcagcctcccgagtagctgggattacaagctcatgtcaccacgcctggctcatttttgtatttttagtagagatggggtttcaccatgttggccaggctggtctcaaactcctgacctccagtgatccgcccgcctcagcctcccaaagtgctgggattacaggcgtagccaccgcacccagccactttttatgctttattgttcttagaaatggggtcctactctgtggcccaggctgcagtgcagtggtgcgatcatagctcactgcagcctcaacctcccgggctcaagacatcttccctcttcagccttccaagttgctggggcaacaggtgcatgccacccctttgtggtgtcttttgtgtgtgtgtgtgatggagtctctctctatcacccaggctgctggagtgcagtggcgtgaccttggctcactgcaacctccacctccgggttcaagcagttctcctgcctcagcctcctgagtagctgggactacaggtgcctgccaccatgcctggctaatttttgtatttttagtagagacggggttttgtcatgttggccaggctgctctcgaactcctgacctcaggtgatccacccgcctcaacctcgggcccatttttctatagctgaacttgaaccatttcttggggacttctcactacactaaattatgacccagtccaaaccacgtgccctggttataaattagacccggggctgtcaaactacaccccaccacatcatcaatttttgtacggcctgcgagctaagaattgtttttggatttttaatgg[187 bp omitted]gtggcgggcgcctgtagtcccagctacttgggaggc[160 bp omitted]actcagcaattcgaatttcagcatccacaaataaaggcttgtgaaagtcaaaagaagagcagtggccgggtgtggtggctcacatctgtaattccagtgctttgaaaagcggaggcaggcggatcgcttaagcccaggagttcaagaccagcctgggcaacatagggattccctgtcttgacaaaaaatacaaaaataagctgggtaaggtggcactctcctgtagtcccggctacttgggaagctgaagtgggaggattgcttgagcccaggaattcgaggctgcaataagctatgattgcaccactgcattccagcctgggcggcagagcaagaccccatctcaaaaaataaataaatacacactgtttaaaagtttggctaggtgtggtggctcatgcctgcaatgccaatattttggaggctgaggcaggcagatcacctgaagtcaggagttcgagaccagcctgggaaacagggtgaaaccccatctctactgaaaaaaaaaatacaaaaattagccaggcggggtggcacgcaactgtaatcccagctacttgggaggctgaggcgggagaatcaacccaggaggcggaggtttcagtgagcagagatcgcaccactgcactccagcctgggcaacgag[143 bp omitted]gaaaccccatctctgctaaaaatacaaaaaaattaggtgtggtggcaggtgcctgtaatcccagctactcgggaggctgagccaggagaatcgcttgaacctgggaggtggagattgcagtgagccaagattgcaccactgcattcctgcctgggtagacagagtgagactctgcctcaaaaaaaaaaaaaaattttcctggccccctccaaaggaaaccaggccatctggctacggttccctggttcagattcgggcggaggtgctgggcatggggccagacgtggctctggttctcaggcaccctgagccccttgaagatcgaggacccagctgggagctcaggtgtcggggccgcaccatagacgcggccgctgatgcagcacttgttgaaggtcaagatgttctgcgtgagcgtgcccgtcttgtccgagaagatgtattccacctggcccaggtggtcgttgaggctggtgctgcgggccttggcaggcacgtcctgcggcttgtagtacatctgcacgtcccagtcgatgaagacgctgttccccaggtagatgaactcggacctgcagaggcactcagggtcacggtcagccccgcctgctgtgtgccatccccatgcctccccgttccgcgtttgcaccggggacgcagccggcggagactcacaggatgaacatggacatcgggatggtgacgctgagcaggatgaggaagctccagaagacgaagaaggactctgcggccacgctgctcccatgcacccccgagaggtagtagtggtggtctttgaattctttgactgagaaaccgaagccgaaggccaacaccaggcagacaagcaccacggagatgaagatctggaaggcagacgcgacagggtgggtgaggggggcgggggtcccccactctgccatcaggatggggtaaacacaaagataaggctggggctgggcacagtggctcatgcctgtaatctcagcacttcaggaggctaaggcaggcggatggcttgacgtcaggagttcaagaccagcctgggcgacaaagtgagacctcatctcgacgaaaaacttaaaaaataaattagtcaggcatggtggcgcacacctgtagtctcagctgctcagaaggctgaggccgaggatcgcttgagcccaggaggctgcagtgagatatcatggcgccactg[133 bp omitted]gcctcccgggttcacaccattctcctgcctc[133 bp omitted]cagcctcccaaggtgctgggattacaggtgtgagccactgcacccagccgaaaaacatttatttatttttatttttatttatttatttattgagacagagtcttgctcagttgtccaggctggagtgcagtggtgcaatctcagctcactgcaacctccacctctggggttcaagcgattctcctgcctcagcctcccaagtagctgggattacaggtgtgagccaccacgcccagctaattttcgattttctgtagagacggggtttcaccatgttgttcaggctggtctcaaactcccaacctcaggtgattcacccacctcggccccagaacgtgctgggattacaggcatgagccatctcacccagcctaaaaatatatttattctggccaggcacggtggctcatgcctgtaatcctagcactttgggaggctgaggagggcggattgcttgagctcaggagttcgagaccagcctgggcaacatggtaaaactccgtctctactaaaatacaaaaaaattagccaggcgtggcggcgtgcacctatagtcccagctactcgaggggctgaggcaggagacttgcttgaacccgggaggcagaggttgcagtgagccaagatcacgccactgcactccggcctggtgacagagtgagactccatctctaaaaaataaataaatacataattattattattttataaaactttttaaaaaattactttaatgaaaaattttctggcccaaagacctgcccacaggatcaggccgcacattttgcagaagaaggaaactgaggcctggaagatgacatccctgaccctgcactcctctgtgttcctggggcaggggcacttgttggcagctcaccacaaccaccagcttgttcatcaggaggtccagcttggttctcttcaaatggatcttgccacagttcttcataatttttgtgtcaaaacctacaaacatgtatccatctatccacccacccacccacccatccacccctcacccacccatcactcacccatccacccactcccccactcatccacccacctacccatccacccctcacccacccatcactcacccatccacccctcacccacccatcactcacccacccacccttccacccctacccacccatcactcacccatccacccaccccccactcatccacccacccacccacccatccccacatccaggcacccacccacccacccatccccacatccatccacccacccatctgcccatctatttgtctatccatccatgcactcatcctctcacacatccatccacccacctacccacccacccatccccacatccatctaccacgctcccatcagtacagctcccactccaggaccctggagcagccgtaccagcataaatgaccagtccatagcaggtgtctgtgttgcgaatcctgcagcctcggaggaggaggttgccaatgtccagggagtatttcttgtcattccattccaggcaccccacgaagtggtgcatccgactgttaggcgcctcacacgtcactgtgcctgtgggtggccaggtggtcagtgggtcagtgggctcaggccctcctccccaggttccctgcaccgggtgcaggtgagaacattccggccaccctcacgagcccctctgtgccccaaacttgccctatggtgccccagcactgggctgcctccaaagccttcctgtccccacctggcctcagggactttgggcaggctgttccttccacggggactcacacttccctgatcctccagccagatcagcccctcctagctcctagctccctccctcgtggttctgatcccagcatgtgacgagacatttatctgtgcaaagctattgttaatgtctgtgaactccatgagaactggtgccagcctcatctcggccacactctgaccccagggcacggaccagcacctgcatgcagtaggtgctcaataaatgtgtcaagagggaagaggagaagggacgcctgatcgatgagcctccttttgggtgccggagcctgtctaccaccaccaccagccccccattcaccaacaccctgcaatggcctcacttcattggagaactgcacagactggcccggggcagcattcagtgagggttaaaatgacaatggggcatgggttgggaccccagaagagagaggggccacagggttcctgaagggtcctcacctgcctccccatcgcgtcttagggatggggaccctgactccatcctggatgcaggaattggagacgctcatggtgggacggccagagggcagagaaccacagggcaagcccacacctcaggccacctctctgaacctcagtgtcttcctctgaaaaatgggtctatgcccagtgagaatgctggggcagatggacgaggccagggcccacaaaagcctccttgctcagcccgggaggaaatgctagaggaagagccgctgcctgtctatgagtctgtgtcccagtggtgttaaagaaggaagccggccgggtgcggtggctatgcctgccatcccagcaatttcagaggccgaggcgggtggatcacctgaggtcaggagttcgagaccagcctcaccaacatggtgaaaccccgtctctactgaaaatacaaaattagctgggcgtggtggcgggcgcctgggatcccagctgctcgggaggctgaggcaggagaatcgcttgaacccgggaggcg[141 bp omitted]tgtggccccctccaccagggctaagcctttccccagatatcacagacagatggggaaaacctctttgggtgtcaggagcaaggaaaagattctgtcctcaaaccaattagagtgactctccttcacaataagataagaaaaccaaacaaaactgtacccccagactgggctgcagcaaagagtaactgtttccacatcacgtgtgaaacatctccaggtggaaaataagaaaccgtcaagcaggccgggtgtggtggctcacacctgtcaccccagaactttgtgaggccaaggtgggtggatcacctgaggtgaggagttcgagaccagcctgaccaatatgatgaaaccccgtctcggccgggtgcggtggctcatgcctgtaatcccaacactttgggaagccgaggcaggtggatcacaaggtcaggagatcgagaccatcctggctaacacggtgaaaccctgtatctactaaaaatacaaaaaattagccagcctggtggcgggcgcctgtagtcccagctactcggaaggctgaggcaggagaatggcgtgaacccaggaggcggagcttgcagtgagccgagattgcgccactgcactccagcctgggcaacagagcgagactccgtctcaaaaaaaaaaaagaaaaaagaaaccccgtctctattaaaaatacaaaaattagctgggagtggtggcacgcacctgtaatcccagctactcaggaggctgaggcaggagaaacgcttgaacctgggaggcagaggttgcagtgagccaagatcgcaccactgcactccagcctgggagacaagagcgaaactccgtctcaaaaaaagaaaaagaaaaagaaacagccaagcattggaggtgtcagcactctgttctcagaggccttcccaccacaggaattgccagcccatgcacgcaggtgccttttcaatgaaacaaccaaacgtgactgtgttatggttaaattttacacttaatagaatgtagcactttatttttggttttgacacaggggtctcactctgttgcccaggctgagtgcagtgatgtgatcacagctcactgcagcctcagcctccctgagctcaagcgagcctcccacctcagcctcccaagtagctgggaccaccggcatgtgccaccacgcccagctacttgttttatttttgtagagatggggtctcgttatgttgtccaggctggtcttgaattcctgggctgaagtgattctcctgcctcagcctcccaaagtgctgggattccaggtgtgagccactgggcctggccagcaccttgttttaaaaacagtaataacaacaacaaaataccctaacttttaacttttacagattcgagggacgtgactccctgctcaacgcctctcaccttgaaaggacgccatcttctttatagtggccagttctttgtgggtgaccatcagggcctgtctgaacttcaagttggtctccctggtgacgaggagaggagggaggtgaaagtggagttgatggatgcttcgaggagcccccagaccccttctggagtcactcaaacattttcactgagcacctactagttcgccagctgccagtcagatggctgaggcccagagagggagaaggccttgcccaaggccacacagcacatttgcaaagtgctgaggccagggcctagggcctagggcctcctgcccgtatgcacacaatggaaacaatggggagggtgggcgtcttcctcccctcagtgcctggcagcacccacgccccagacactcatggggtgagtgaccaaagtctctgagcgaccttggctggccgcctccttggtgactggggaagggggctcctccgggccatgctccccaccccccagggtccccagcgatgccacagctcctcacccgtcaatgtccaccgtctccacatagcacaggctgctgggctccgtgctggccagcaagagcatgtcggcctggtgtggagtggggggcagcgttgcaagaggggatgcaagacaaattgggggtgcggcagccctccccaccctgggaggggtgctctcggtgagggggcgcgtggttctgggacctcggggtcaaccccagctcactgggacgatgttgtccttgcggagacagaccacatcccccacgcacagatcctgccatttcttctgcttgaagctgcggggagagggggttgtgaaggaggcccctccctctgccaaccctccccacaccgggagaccagaggcacgggatgacggggggcccgcagctgcagtccccacctccgggcctttgccccctcaggaagccttccccgggctcccaccccactccccgcgggtccacgctcccacccagtgacctccagggtcctgcacccacgtcctcttcagactttccttgtcctccccatcgcccgagccctaagctctgcaagggttcgccatcagggcctcggcctctgtcctcgtcccggccaaacgcctaatgaatgcaggcccggttcctgtcggactcaaccagccgggagatcagggagcacggaaggtgatggacacttgccgaggccgatgaccctgctgggctggagcccccgtgtccccgcggatccccagctgcagccccagcctcacctcttccccatcagaatctggcagggtctgttgttgatggctctgtcactcttgtgtctcccctgggccaggagggaaaggatcagagagaccgtccagcctctcctgcccccgcccaggccgctgccgcactgcagcccagcagtgcccgcccgcaacacggggtccctgtccgctggccccacgccacgttgcgtctgctcagggatcccggacgtgggggccactggacccactgctattggcggggagaagacaggcgtgctgcccaccacctagagtgcctgccagaccaccccccaccaaagctcaatggccccaaaaccacgcaccgacagagccaacgccacctgcggcacctgcccaatgtgggtgctagcagataaggacaatgtagccccagcagctgaggctcccaggcccacgttcccctaatgctccaggaagcccagccctcctcccactctcgcccagggatcaagagacccccccgaccggccccgctccctcccccaggcagctgcatccaacagcactcaccatgtcgtccaccaggtcccgggtggcacggatgaagaggaggcagaccataggggtactgagcgagaaccagggcagcgtggagatgtcgggaatgctctgacgtgagggggccacaggaagggtcacaccagcccactcccccgtcccctgcccttccaccaagccgacctagccccgcactcgacaccacgtgacacatctgctggccaccttgaccggggtccagccatctcctgcaacccccagccctcgggacaaacgccccggcatccctccacctgcctggaacttctcccacacgcctcgtctccccagcaaactccccttctcccgtccaagcccagctcccacggtgccttctccagggagcctcccccagccccaagcttggccgccactgctccccctccctcccatgtccctgcttccccaggtcaccctgcaggtgtgagctccaccatcccctaccctggcacccggccagcggcctgcacacagtaggtactccattaatgctgaatgactcgatggatgaaaggagaacctctccatccagaacagaaatgagatgttgggtgagagtgtttgctctgaaaacagcgcccctggccggatgccggccccacgctggcctggaccacccaggtaccgggaagtggctccacaggtcctgagaacatgctctgggctcctccttccccctcgcctctgaggtcagctgggagggcgggggccaggggagctgcgtggccgaggccgtttaggctggggaacagctatgcctcccgatgcccagccctgcccagcaggaaccagcggggcgtggagagggtgccgtcatcagacctggagggtgcatccatccacctttgtcattcaacatgtactgagcgcctcttgtgtgccaggccctgggcagggtagtagggactcagcgctgagggtcccagtctgtggggagtgggacgtgaacccacccatcacacagacaaacacatcgatgctgccaggtggctaggggggacttcctggaggaggcaacacgcctcacctgcaggatgatgatgatgaggaagaacaggttggacacgcggtggaactgctcgtacaggttcagcggcaggaacgagtagaagttgtacttggccgtgcggatgacattggtctggaacgagagccgcgggctgcctggcagaggggtgccatccaggccaggggatgggggtgcccgaggccagacctgcctcacttggcctcgcccagcatcctctgggctatgggacacacaccattcattaagcatctactgagccagcagttactgagcacctgctgaatgcaaggcctcagaccagcatttactgagcacctgctgaatgcaaggcctcaggccagcatttactgagcacctgctgaatgcaaggcctcagaccagcatttactgagcacctgctcagtaatgtaaaagcctggagccagcattaatcaagcttctactgagtgcaaagactcatggagctgtgaccagcatttcccaaagcaagacacccaagaggatttcaggtagggccgcgatggacacattgtactttcaggttgggtattaactgaccctcacgtgcactgggacagggcaaatgagacacacagaactcttgtgccaaaccagtgatttggttaggacgggcggttcggtcctcgagatgaaaataaaaatatcggccagacatggtggctcacccctgtaatcccagcatttcgggaggtcaaggtgggtggatcacttgaggtcaggagttccagaccagcctggccaacatgacaaaaccccatctctactaaagatgcaaaaaattagccgggcgtggttgtgggtgcctgtaatcccagctacttgggagtctcaggcaggagaatcactagaacccgggaggcagaggttgcagtgagccgagatctcgccactgcattccagcctgggcgacagagcgagactcc[134 bp omitted]tgaaactgtctctactaaaaatacaaaaattagtcaggcgtggtggtgcatgcctgtaatcccagctacttgggaggctgaggcaggagaattgcttgaaccccggaggtggaggttgcagtgagccgagatgtcgccactgcactccagcctgggcaacagagggagactctgtctcaaaaaaaaaaaagaaagaaagaaaaagaaaacgaaaaccaaaaaaagaaaactatcgagcaaatacaagcagaggcaggactcaggaggagcaaaaaatagattccccgagggtaccacggcagctcctctggagcagggaggcgcgggaggggccgcccaccttgtatttcttcctttgccagcacaggatcaccttctccttgaactgcccgttgtaggcacggttgttggcctggaccttccaggtgaatgctgcagcgagagagccgggcgtcgctggagctcgaggcccaggacaaacacccctaatgaccgcccggaggagggctcatggggcccgtgggacccaggcactggggaggcccgagatgtcagagcccgtaaacagacagtcgggcagcaggcaccacctggggacctaccagaccctgcccatagttggcgccggcacaagtggattccgagagtggccacccacacccccagccaggggcctgtcctgagacgcagagaacaggccctgggagaccgttcaggcctgtacattttacagaggggggtaaactgaggcttggtgatgggctcttgggtgtccaaggccatacatccagctggcggcccagatctttctgggcatgcagcccccaaatcctgagccaaatcccccaaacccagtcagtactagggttggagactactagaaaccaaatgagaatcctaggcaaggcctgacgtgcaggtctgggggccccagcccgtctcagcctcagccctgcacttttttcttttttttgagatggagtctcgctctgtcacccaggctggagtgcagtagcacaatcgcagctcactgcaacctccacctcctgggtctcctgggttcaagtgattctcctgtctcagcctcccaagtagctagaattacaggcatacgccaccacgcccagctaatcttcgtacttttagtagaaacggggtttctccatgttgcccaggctctcgaacccctgacctcaagtgatccacccgcctcagcctcccaaagtgccgggattacaggggagagccaccacgcctggccagccctgaacttcataatccctcccacctgcaccgccccctctgcccaggatcagcacctgagttcctgtcctcatcttggagatcttctctctggccgaggctgcccatgctggtggggctgtgggagagaagggccccgggtcacagcagtgaccccagcccttgctgggcaccactcggtcttcaaggagctcacagcctaggggccgaccctctcaaatgctacctcccacactcatctgcagcctccccgccaggctctgaatgtccagccataggctgtgtgtcttgccttggacatcctgagacctaggggaccccaagatgatcctcaaacctgcaacagcccatctgccagtgtcccccgccagccaccctggtcgcctcccgccagtacagcctagaaggactctaccgccagccatgccagcctctggccatgccagcctccggccactgctccccacacctcgcttttcctgaaaggaccactctcacctcctcctggtttcactgacggcctcctgcccctctccccatgtggcaccagcttaggggctcagtcatctgttcactgactgaatgggacccccgggctatatgttatatctcaaaacacagcatgagggtcaggcatggccactcccctcctcacccccccaggctgggcagcaaactctgatgggggcgatggaggcagacggacatcgtcagaagatcctggaatcttctccactagcaggttcaggaatgtgggtctggctctagccctgcaccgggggccctggtttggccccctatgaggatgggcaaaccacccctagacgccagcaactggccccccacctgccagctctctagcagtgccctccccgccaagcccctgcccctgtgttccggccacccgatgcacccgtcctcacccttctggtctccattcatacttcctagcccggccaggctgggccttgtgcctcctctcaggtgcccctctgcctggggagtctcccatcccagctctgatcaccgtctcacctccgcggatgccagcaggacctgagccttcctgagtcacgtctgagtcacccgtgtccccaggtcctggtggggcagggcttggctcagggccagctctggtgctcctgggagtctgagcggggccagtgcccattcaccgcatgaggaaaagggaggttcagggcgaagaggggtttaggctgtgggacgggggagaggtgggggagacccccgtgggggcagactggggattggagagttggagagaatgctcaaatggccagaatccactcgaagtgtatctgggggcagaaagagacacggacacagcgctggcttcctgccccctcactaactgggatgccccattactcggaagccccccaccccgtcttcccgcagccgcaggggcacaggaccgccctggacagggctccagagtccagggctgtctgcacccgccccggggccccgaccgcgcgaacctctaggggcgcgctctccacccccgccgccacgaccccagctctcagcctgggtggagcccagagagggtgcgcgggctcccggggacgcacagcagtgggagcacccgccgctcaccggcgcaggagaggcaggggggggcaggccgcgggcgtccagggcggcggacgtggtggaaccgttagcccggtgccaacggtcctgaaacggggggcgggatctcggggcggggcctcggggcccggccaaggcgaaggtggagccagttcggaccccggaagggggccgggggcggggcctggagggggtgggtggggccaaggcgaagaaggggcggggcctcgagggtggggccgagcggagcacggccgagcaggatgggggccaggcctcagggacgcggtcacggccgaagggcggggcctcgcagagcctcgcagaacaggccgggatagaagacgctcgggagcagtgcctgggtctggggaggggccgggactttggggaagggactagaaggaaggcgaggacgagcggggtctcgctgagcaaagtcagagtaggggcggggccaggactcaggggcttggccagagcgggaagcggggttgagcatggccttgcggagcagtgttatggtaggggcggggctgggatccggagccgttacaaaggaggaaggcggggccgcgcagagcagggtcagggtaggagggcgctcagggtgggtccaggacagaaggcagggccttgggagggccttagggagcagtgccagtgcaggggcggagcctgaaagggaagagggtgtcagggcagggccgggccgggcttggtcagggagcagaaagaacctgcaccgcagggcggggttggaagggttcttggaaaggtgggcctgggtcaggtcggaatgggccttgcagacctgacggggctgaggctggtgcggccagcgtggcagagtgcaggaggaaggaccacaggtaacggcggttatgtaagtcatgtctgatccgtgtcctgggttcgttcattcatcccatacacgttcaacgagcgcctcctaggcgcagatgcagggctgagcaccaggctggggagaggcggttatagccattgagaccaccctaaggccaagaggaagcccgcagggttctttccagcaggtggcaggggctcagggatccttactgaagaagtggcaggggtgagttcagcgacgaggctagggcgggtccaggccagcgatagggcctggagccagggtcagaaagtgtgtgcggaggggctgctgaagatgaaatgcccccaagagtgaggctacctggggtgagggcccaaagggagaggcaaacatgggtggagggggatagggaagccacctcccccatcaaagcggcaaccacctgagggctctcggtgatcacaaaccctctttctttggaagcccaaattggaagcctgcttggccctggaggctgccagggaacctctctttttttggagacagagtctcactgtgtcacccgggctggagtgcagtggtgcgatcagagctcactgcagcctccacctcctgggctcaagcgatcctcctgcctcagcctccagagtagctgggaccacaagcaggcaggcaggccactgtgtttgacttctctcctttcattccttcaacacttcccctgtgcttgcttgcttgctcagtggttacgaaaaaaagccggggctgggagtttgaacacactgttctaataaactttagaagagacctggttgggtgcagctgtgaggaccagattcccccaccccagccttcgcagggggcactatctgggggcaggagcttgcccagggcacttgtgcaaaggccctgaagcctccagtggcaacaggtggcttcacaagctgaagggagtccctgggggctgaagccagggctggccagccttgggaccccccgtgggctatgtcctgaggcaccaggtgcgttctgggaagggggaggcagacatcacatgggaatgcacagaaacagagcgcatacacgcctgcgccatttatttagaacacagagccgggcacagtggctcatgcctgtaatcccaacgctttgggaggccgaggcaggtggatcacttgaggtcaggagttcgagaccagcttggccaacgtggtgaaaccccatctctactaaaaatacgaaattagccaggtgtgatggcacagccataatcccagctactcggcagacagaggttgcagccagctgagactgggtgacaaagcgagactgtgtctcaaaaataaagaagaaaaagaaaacaactcctttacagaagaggtgggagagtcactagtcacaagaacagccctcgagggtggaagggcctggcctaaccacggtcccccaggagggccctggagagatgcagagcccagaaccgggaagggagccttgggatggagtcctctggggagggcccccacgtcctcatcccgggacctgtgcccttggccttgcccttcagcagaagcccaagaccagggtggcaggaaacccactccaggcaacctgcccccagctgctgggtcctgtcccgcaaggctcatcactttttctacttgaggtcaataaaaagtggggcctaaacacccctgggcctcccatttccaaatggggtcccgatgcaaccacagttgcccgagacgtgcgtgcactacacaatgtgtggcgtttcctggcaagggccggagcagctttccgtgtctgcactccatcctttgacgggcaacacacagcagctcccagtctctttaaccccctctcaccatctgtgtgcagtccctatctctgggcagggcagagagggaagccagctctgtgcacagggcccagctccacacagggctggggacaccacccactgtccgagaggcactagaagctgcaggatggtggcccatgatctggggctggaactgggaccccacagcaggtgtggcccagccctgggggagccagccctgggccagcttttgtgagggaaagtttcactgctctgttttctctgcgttgatgggaagagaatcagtcccggctgcagggacagtggcctccccggggcacatgcagaggcctcaccaggcaccaagaccaagaccaccacaaaatctaaaatccatacaaacatttattctgtccctgcctggaggtgagggggaagggggtccggagagccccgcagaggaggacggggctctagcgggaagacagtgtccggaggccggtgggctccctctagacggcagaccctggggctaacgaggggccagctgggttctcagaggtcacggagtgcaggggtggggcggcgagtggtggaagccggcgcccccgaagaccggccagcccctggagcacagaggcgggtccagcccacactgcgctgagtgtggccctggcccccactggggtctgtcccacccccaccccgcaggagggaaggcagcaggcccgctcttcccggtgggaaagatgctgtgcaagtcatcaggtttaaattaaaaataataaaaataacaatacaaaataaaaaaagactgtctcaaacaaacctgggacaagcccgccccgcgacccacgtgaggagcagaggtgccggccaccacccgggagggagggcctggcaggaggggcaggaggggctgcgggccgggtgggggcgggctctgtcctggtctccatcagcagcagtttctagagacgccagagggctggggggcagagggtggggaccggcggaggggtgcggcaggacgtgagcgggggtgggctgggctgggcgttctctggccgccagctcatcccgctgctctgggctgcctcggccaggtggacgggttaccggagatttattgcactgttttggaagaggcatggggctaaggaccagcgggacggcaggagaggcgggtgggaggcgggcaggcgtcatcgcttggtcttggcgtcttctcgaaccttccagatcaccaggtgcatgcaggcgccggcgtcctcgctggagctgtgcccatccactgcggggcagatgcggtgagcacccggcccctgcgcagggacggccccagggcaggcaccggcactcaccattgtcctggatgatctgtctgaggtagtcggccatgaggttccgcagggaccgcttgtaggggaggcccaggcggtgggggaagagcacagacgtgtccaccacggtgctgtggatgacctgtgggcagcggcagagatcagcgcacgtggggcctgcgcaggtcctgctggagaaccgcgcgggacccgggccggcagggcaccttcagggccaggaggtcgctctccaggctgtgtccgatgaggatggtgtcagcgctgaacatgctcagcagaacggcctggacgtcacgcagcgtgacacttgtgtcggcaaggtcagcctccgtcacccccgaaaacctgggggaacgggcaggaggggcaccagggctcagcctggaagcactggctggtggggcgggggagggtgggtccctggggagaggcggctgggagggctcccagctcgtggagggcactggccacacctggtgttgtagtccacgatctcgttgtcaggcttcacgaaggtgtcataaaccacgtgcacgtccgtgtcgaccaccgtgacgcgcgtcagctccaggccatatgtggtgtaggactgcgggcaagggatgcacctcagatgtgtcccaggcaccggcctccctccctccccttccctgcccctttgagtctccagagcccctccaggcagaggcagtgaccagagactctgtgggacttctaggagaggccgagtggggtgtgacctcagtaaccccctttcgcaaagccctcctgcctcccattcagaggcagagccggggcccagtgcccggtgtgcttggctctgctgggaagtatggggtgttggtccagggcaggagccacaggcaccggtgctgcgagagaaaccctgagcgctggccggtgagccaggcccagatggggccagatggggcggccgcaccaggccaggtcctccccaatcctgaacccgacgctgggcagagaacagcctcaccatctcgcagtccagggcgtagatccccgggtgggtgtctcctgagagctctttctcaaaggtcttcacgaagccctcaaggcgctccttccggccatcctgcacgtgttgctgggggtggagaaggcaggtgagggcagcttcggggtgcagtgggggcgggggtggcagcagcagcacatctctgagcccttcgggaccatcctatccatccatcacgcccattcactggttgggaccctggtgagcaggtggggaagggggcttgccaagaagacacagggaggacggcttcccaggatgggaagtggccagggacagggcctggggcctacgggtgctacgttctctgggtaacacaagaaaggctgcccgggggcccagaccctgagcccaggactgtgctgtgtcccgagaccccacaccaacgatggggaggcagaagtctgttgagaacaggcagaggggactgggacgccagggctcacctttgcgacttggcagccgacagagccggcggcagccgagcagcacatgtactgggtctcccagcctccggccactgcaggggacacagacacacagtcagggcccggccaggcccactccacagcccccggggcactgaccacctgcatctaccgagccctactagggagtgaggactgaggacaggaggcctcagcctcttggtggagctggaagcagaccaggccccggcagtcgtgtggcagccaggacgcccaggcctggatccagggagaccagtgccctctgcagaggcctcttggcagcgctgccccgggcagcaccctccaggtatccctgaggcgatggctttaggggccgccacagggctgtgcaaggctggccatgtgccctgagcgtggctgcgtggttgcctgggggattgaatagaaccaccaggccaagggtgggacaagcccctccgctcctggggccagcaacctccacatttccatggaccaagggcacaggaaggcagggacacagggcctttcaggtggtggcatttgaaccttgtcatgggaaagctcttgtcttacttttgcataaagaacaggtggagagaaaatgaggccaagggctagccccggctctgccaaagacggtgcagcccagggaccctgagtgggatggagggcctgggtaaagccttaccccagttctgggggcctcaagggagggcccaggttccgggggccatgggtgggaaggggaaggacccgggtaaggccttaccccggttccggcgcagccgtccccagtggtaataacactcctcgtcccggatgcagcggcctgaagaggacacgaggtactcggtgccacagcggcagcaggtcctgcaggaagctgtgggtggggacccaggtggaagctgaggctcacgctggggcccgcatgcccggccttgcccacatcccgcacctgcccacctaggccgtcgcaggccagcgactcacagtccttgggcctcttctcctcagctgtgaagatgattgcgcccccgggccgctctgggtgcgggaaggggtagccgttctccttgagctggtcctgggtgagcaggtactccctgaggcggctgtacagggcagcccctgtggacaggcacagtggtcagcccctgcctgggatggcccacggggcggtagacaccaccgggaaaggcggctgggccggcaggggcccacgaagcaccgtgtggcacagcaggggctgggccggcagaggcccacgaagcaccgtgtggcagagcaggggcagggccttacctttcaggtcctccacccgggggctgcttggacggctgagcgagaagctggtcttggcggccaacctgccccccaacaccacctcgtgggacacaaccctgcggccactggtttctggaaggaagggagggaggggaggagggtgtgaagtagctggctcagacccctgccccgcctgctctcccacccaccctgccctcctcagacctctgcctcaactccccctttctgggacagcaccccactgaccccgggttccagcctgacccgaacaggagaggcagacatgcggtgagccagggacgcagggcagccgccagctctgcaggccccagagctgcacggaggccccacacccaaagtcttcgtcccctcccctcaagcgaagggggaagggcggggagaacagcacgggggatctaatggctttcgagggctttgagccttcatgggccacccagcctgcgacgccaacccagggcccctccgagtgctaatgcaggcggggacgggggcaggggccggtgatagcttaatgcagcctggagaggctgcaatgaaacgcccaggtctccgctttcttcctccccagagcttaatgcatggagctcgcccagccctgggcctcctgctttgaagaagctgccgcagctccattagcaggcggcccctcggctcggcttggagaccccactcagcggaggaaggcggctgacagcgaggacaccagggccaggtccgtcctacacagaagcctgggaaccaggcagcaggcagcccccccacagcaccgcgctttccttttgtctgagactgtggctgagctcagggctgtgaaggtcccagcgagggtcccagcccagctgccaccccaagagcaaccctgagcctcccccgcccacccgccaggactcactgctgaggccgggcacagcgctgggggccaggcccctgagcttcttgagggtgttcacggccacattcaggtagatgttcttgctggggctgcggtcataggccaccttctcctcgttcagtgcctgggggacaggcggtgcccagctgaggccatgcctgcctggtgccggggagccccagcggtggggtcgccatggggtcggggacttgcatctctcccaggcagctccgggtcacagctgcggctgagaggccgggggatgtctggggaccaccctggacccctagtccccacccgaccggccagataggaactccaggacctcaccttctctatggcctcctggttggaggtacagaacttgagacactcctcgatgaacaggttgagatagcgctggcggatgacggtggggactttgcccccaaactctttggggataatgggtttctttaaactctagagggaaggcaaaagctgccatgggtgagggcctccacaaggcctccagcggggaacgcagacgcgatgaggccgtgcccatggctggaggcaagagtgaggtgcgctgggacagatcagcctggctgcagtagggacagacacgccaaggcaagacaggagcagcaggggaaactgagggcagcggaactaaggtcatgggaaactgaggccatgggggcacaagggaacttgctgtactttctgctcaattttcctagaaacctaaagttgctcaaaaaacataaagtctattaattaaaaacaaaacaaggccaagcgtggtggctcacgcctataatcccagcactttgggaggctgaggcaggaggatcacttgaggacaagagttcaagatcagcctggacaacgtggcaaaaccctgtctctacaaaataaaaaacaaaattattagctggggtgtgatgacaccggcttgtggtcccagctactcaggaggctgaggtggaaggatcacttgagcccaggaggtcgaggttgcagtgagccatgattgcgcccctgcactctagcctgggcaacagagaccctgtctctaaacaaaaaaaaaaaacaccaaccaaccaa[162 bp omitted]atacaaaaacagccaggcgtggtggcgggcgcctgtagtcccagctactcaggaggctgaggcc[137 bp omitted]gctgtactgcggtgtggagcacgaaggcccgcagggcaggggcgaggctggccctccgcaggtcccatgtggccgggcctcagggcgtggtcttgggggtggtggtcctggccgagatgggaggggctacctgtaaggatggactgtgggcgattcgcttagggatgatggtggtggtagtcttggacgccatccccgacaatgtgcgtgttttcagctgctggccacctggctcagggccgttggaggactggctgccgctggccgcaagggtcctcttggcacctgtgggggctggcggggcacagggggtgtgggcacagggcgagtggctgcccatcaccacgtggcggagcaccaggcagccgcggccgctcagcgccagcagcacgtgcatctccgcgtgcagggggccgggccagggtgaggggctggggctgcgcaatggcatcaggctctagctgccttcaggcaagtccatcgaggcagaggacacaggtcaggctgcggaggccgctgaggacacgtcaccggtggggtggtccaggcctctgccacgtgttctgaccccaagcccaaggcgtcgatgtctgagggaaaggccctggctcccggacagaggaccgaagggtctcgggtgcccccacctgctcattggctttgccctgccctgcggcctctgtgttctgccttgccctttgatgaagtcacaaaccagagggaggaggccaggcctgcaggggctgcttcggagggctggccacgcgggcagctgcaacctgggcatgtacgtctgtgtggcaggggggcttctggactgggggctcggcaccgacccaggaaggggagctgtgagcagggacatctggccctagtctcagagcaacatccctcgaaatgccatctggccctggaaggtgcaagggaggcaggatgagtctgctcatgctaccgcgggccgcccagcaaggaagcaggctgcccgccaggctggcacgcgcctcttgcagtggagggtttgctcttcaggaacggacagagaacctccagactccctcggctgcacgctgggggcgagcccaggcagccacaggagtcctccaagccagatgagcccgccctgcggcactgccagcacttgggacgccagactcccttcaggcggcgggccccaagggcactgcgacagctcagcacccaccacagatcagcaacaggacaacccgagcgcggagacacagacgggaagcgtgtggggtcctgggataggcccaactcaatgatttcccctccctggggctaaggtctcagccgtgagggggctctggggaggggaggtcagagtagcctggagagctctccctaaggagggccgtgggatccatgggatctgcaggggaatcgccggggctggccctaaggctctccagccagcgccagggaggcaggggctccaaaccagcaggctgctcagggtggtcctcggacagcagccatgccctcccagggagcttgccagacacacagacctttcccagcctccagaccagaacctgcattttttaggagctttctgggggaccctcatctgtgacctgcctccagggatactttctcgctctacagacaccactgatgtgaagacgcaggagacaggacaaccccccgtgaagggtcctgtccacccaccactgaggcctggcccgactttctacaagaccctgctgggggggaagtgcccctcggagtaaaggaaatacagccccactcctgggaagacagcactcatttccatcagaggccacgccccccactcacacgccaggagaaagccacacctgcagaagcctgctccccacccaatgccaggtaccccgacatggctccccattccctggaaccacaggctcaggccctggttcagcccagtccccagcaggctgttggactcctagtaaccccggagctgggtcagggaaggaaggtgctgggccaggcctcctgcacccctcaacagtccccatttcacagacaggcaggctgagggccccagggagggggcccaaagtcatcccatgagcaagcaccatgtggttcaggtgagctcagagacctcagggtgccacctctcctgcccacatgcccacggccccccggcacaggccccctgggccaggactcacctgcagccaggcgggggttggggatgtgggcgatcctcctcttctcgccaggggcggaaatgtggacggagggcgacttctctgccagcctggcgggggcctgcagcaagctcgccgatgccctctgcgcctgctgggcccgcaggtagcacacctcctgcgccgtcgggggccgggccgggggcaccgcgggacccctcctcgggggctccacctgcgtcaccacaaatgctaaggcctggcagcacagcgggggcacctggagcaggcgaccccgggcaggcttgggagagggtggctggagctcgggggccggaggcaccacctccctggctgccttctgagctgctgggcacactggggggaagcagcagggggcagtggtcctcaatgccatgtggctccaggctcccccactcccagtgtctcccggtgcccaggctatgtcctcagccctgataaggcacgggtgggcgggactaccccgattacactggcactccaatccaatcccactacgcctaatcttcctcaaagcccctcctctggggaggctctgggactggagcaactgggactctcctggctgctgaccccggagccaggctctctgcttgtcctgcactacctcgccacgtctgcacaggggcctgacaagcgctactgtctccgggctacagaggacactggagctcagagctggacaaccggcccaggcccaggccgcacacggcgcagcaggccgtctgccgcactctgggggaggtcaccctggggctgctgacctgctctgtccctcgccccagcaccgtggcaatctaacaggaaggggcagggccagctccctctggaactcgggcagcgtcaaagataaggtgtcttcaaaaagctcatggaaaacgtgcgttgtgacgaaacttgcatggctttcaagtttttttgccccaaaataaactgatactaacttgtcataacatgtctgaaccagacggagtttgaggcactaaaaaaaagtaagacatcagttagaacagagccccagtcagagcaacaggagttctgctaaaattgaagcaaatgttaagcatcaaatttatggtaaaacttgggtggaagaacgaatggggaaatcactgatgctttacaaaaagcgtcacagatttacaggaacaatgtcccaaagaaatcagaagtttatgaatggataactcattttatgtatttatctttttgagacagagtcttgccttgtcgcccaggctggagcgcaatggcacgatcttggctcattgaatcctccacctcccgggttcaagcaattctcctgcctcagcctcccgagtagctgggattacaggtgcgtgccaccgcgcccagctaatattttgtatctttagtagagacggggtttcaccatgttggccaggctggtctcgaactcctgacctcgtgatctgcccacctctgggcgcagtgcctcatgcttgtaatcccagcattttgggaggccgaggtaggcagatcacgagaccagtctggccaacatggtgaaaccccgtctctactaaagatacaaaaattagcctggtgtggtggtgggcacctgtaatcccaggtactcgggaggctgaagcaggaaaatcacttaagcccgggaggcggaagttgcagtgagcagagatcgtgccactgcactccagcctgggtaacagagcgagactccgtctcaaaaaaaaaaaaaaaaaaaaaaacaaccaaaaaacaaacaaacagaaaacagagggatgaagctgggagcagtggctcacgcctgtaatcccaacgctgggaagccgaggcaggaggatcacttgaggtcaggagttggaagaccagcctgggtgacaaagcaagaccccctttttttataattttttttttttgagacagagtcttgctctatcacccaggctggagtgcagtggtgcaatcttggctcactgtaacctctgcctcctgagttcaagcgattctcctgcctcagcctctctagtagctggtattacaggcacccatcaccatgcccagctaatttttgtatttttagtacagatggggttttgccat[138 bp omitted]ggcctggcctctgcggaccttacctcctggccttgcttggaaaggtgggagatcctcctcttctgcccggggaacagagtggtcagacccgaaagccccttctcctcactcttctcttccttggggggctaagacacatgtccgtccgtcagcacaggtctgccctcgctgccaacaccaacacaccccaacctcaaactgcccccggcaagtggggaatggaacagtccagcccccaggcacagcagctgagggctcagggccaacagtccctgggctttgtgtgggtgcagtcggaggggtgggcaggtgtcacacgttctgcagatgcccaaggctacctctcctgggcacccagggccccagcttggagaccccagggctgcagaatgaaagcacactgggaaagcgaggccaccttgggccgaaccagctgctgcgggctgagcacttgggctcagtctgtgtggagtgagctccccctggtggccaatttggggacacggggccaggagacccaggggtccagggctggcccaggagagcaagagctcgccacgctgggagtagggaggagggaggggaggagaaaggagccggaggggatgaggaggaggcaaggagaggagacagaggagctggaagagaagagacagagatgggggaagggaggaggggagaagagagggggaagggaggaaaggggaggcgaggggagaggggctagaagggtgtgccggaggtggattcccctgaggtgggtgggtgggccaatatccccctgccagtcagtgggaacagaccgtgtgcacgtggccacagaagcctggctggtggccacgggccagtgacctctgggtgggtgaggggcaacaggagcaacagggctgcccgggtgctcctgagctcctgagatttcaacgggctcagggaccagcactgaggagctgcctccaccccgtgcctccgagccaactggaaaccactccagatagaaggtctctcaccaggccctcggctctgcctctgcccgagcccagccccagcacccgcgcgcctcacctgccgggccagccggcctctgtcctccgtcttgacgctggtggactcgttgaagatccgcaggcactcctccatggggtcggagtcaaagtccacctccttctccagggccgagtagtccacatccgcccccgcgctggaggtggaggaggaggaggaggaggaggaggatggggcgggggaggggggcggggaggccttgagccgcttgggcggcccctgcgcctccgggaagcccaggctggagtctgagtcggagtctgagtccgagctgaggctggggagggcagagggccacacgctcggcacccctggccctgcggcctcgtcctcactctcgtccccaaagaggtcggcgtggctcagggcccgcttcttcagcttgggggcgtcctgggaggcgccctcgtctagtgagcgggctttccgctccactagcttccccgacggggccttggtgctcttcctgtcgggcagctggagggggcggggtgggcctctgccggccgccggtcgggagtccccgcttgtggggctcggccgccgcgctggccggtcaggcctccctttccctgaggtggccacaggagtggccgaagatggcttcttcttggtcccttccggccgctctgccttgcgccgggggctgctggcctgcgggcccttcttgtccgcacggggcttctccacaggccgccctcggcccttgtccttggtcttgtccttcccctgggccccgtctttgcagctgggggcaggtggggccccggtttttttcttcttgggttttccctccttggggcagcccccatcctgtgaggactggacctgggctggggaggcgggcttggctgggggcggctggaggtcccccacgtcgcactgcacggccgtctccttggtctcccgcaggccgcccccctcggcctccaggccctctttggagggtggctgcccggtggccttgatctcagggtcggccctggctttgggggtgctggccgtggtgggctcgttacctgggaccgtggcggcctcatcttctgagtctgagaaccttgcatcgcaactgccaaaggggtcacagagcttcttgggagcaggtgtgtagggctcactgccgcgggagccccggggccgcttggcggcccgctcatcccgggagctggccctgctgaggtgccgggccgagtagttggagagagggtcatactccaggtctgtgggtggcctggagttgtccaccacgtacttgccactgggaacggggcggctgtgccgccggggctggctcacagccttggggacgtattccagggcaccgccaccccctccacctctgccctgacccctgtccagggacgccagcgagtacttgctgcccggctcggcaggggcggccagtggggtgggctggtagccggcatcagggcttaataggccgtggctgccggggctgtagtcgaaggccagtgggaaggcatcctcgtccgggcccacagtggggctggcgttggggccgcggggcgccagggcgggggcctcggcggagcggtgctcacgggtcgtctccagcagctcccggtagcgccgctgctccagctccacctcactgcgcacggcctcgatggcctggttgaccagctccaactccagcacatccgggcgcggctcctcccccaggcccagggtgccattctccctctgcgcggggggcttgggcagctcagggttgtaggggtcgtaacccagccctgaagggaacagagagcacagctgtgaccagcctgccggagaggagcccgcagcatgggggcggccccggtctcaaactgcagggaagggaagagacctgcctccgaaacccaccacgcactggcgcccgccaaggctctggggtgcccagctgggtacaggccatggcgccatctcaggccctgtgccgggccccgccttgccctgaccaatgggcgctggatgggcctgggctgcgtgacacacagctccctgggtactggaggctccctcacacggctcatgaaatgcgcacaatgaccatggtggggtggacactcgacaggctggaactccccggggcaggcgggtgtggagctcccagcattcagggtgccgggctgaggcaggactgggctgggccgacaaccacagcctgacggtggacacaggagagcccttcctcagccaacacggccccacccagccagcagtgtgcccgcggtgtggcggaggtgtgccagcagtgtgccagcggtggtgtggtggcggtgtgcctgcggtgatgtggctgagcagggccgggggatggggacatgcccagttgatgggccaccctgcaaaatccacaggaagattttttttttttgagacagtctctctgctgcccaagctggagtatagtggtgcgatcttggctcaccgcagcctctatctcccgagttcaagcaaacctcctgcctcagccccccaagtagctgggattacaggcgtgcgccatcacacccagctaatttttgtatttttagtagagatggggtttcaccatgttggccagtctcgaactcctgacctcaagtgatccactgcacctggcctactttaaattaattttttaatttcaaaactttttgtagctgggcgcggtggcgcacgcctgtaatcccaacattttgggaggccaaggcgggcggatcacctgaggtcgggagttcaagaccagccagaccgacatggagaaaccccgtctctactaaaaatacaaaattagccgggcgtggtggcgcatgcctgtaatcccagctactcaggaggctgaggcaggagaatcgcttgaacctgggaggcagaggtttcggtgagccgagatcacaccattgcactccagcctgcgcgacaagagtgaaaccccgtctcaacaaaaaaaaatttgtagaggtggagtctcaccatattggccaggctggctttgaactcgtagactcaagcaatcctcccacctcagcctccaagatagctgggactatagcccaagctgctgtgcctggcttaaagcacacggctgaaatgtcttcccggggggcagctgggaacatgagactcgcatgttatttacgtggttccagaacatagtgtagcagaccctcacaacctcaatgccaccaacgtcagcacagaagtcagaaccacagaagcctcccgtggggacaggccgaaggagtctaaagaaaacatgagcaagtggagcccagtattccagcgaagcaataaaaaccaagttcaaatatttactccagaaacttggaagttgaccattagaaattctactgagcacggccaggcacagtggctcacgccgatcatctcagcactttgggaggctgaggcgggaggatactgcttgagctcaggagtttaagaccagcctggatgacacagatcccatctcttaaaaaaatacttaaaaataagctgagcatggtgatgcacacctgtgctcctagctatgtgggaggctaaagtgggagaatcacttgagcccaggggcttgaggctgcagcgagccaggattgtgcctctgcactctggcctggacaacaaaacaagaccccagctcttaaaaaaataaaataaagttccactgaatgtaattccgtaacatctctaaaggtctctaaaggtcaacaggtctgatcctctggagttggcaggaaatggcgccaaagacgtctgcgtcctaattcctggaacctgtagatggtatatccccttagatggcaaatggggctctagatggggtgaaatctcccttgcccgtcactgagggggccatggacaggccgagatcttgcagagcagtttcgcaaccatcccatgcagcttcaacaccaccaccttcagactcggaatcctcagaacccgtgccacagacagaccgcacagggcaggtacagatgcgtctggtgcagccttcactgcaaaaacacaacaataaataacgcaggagatgacctagaagccgaaacgcaggtcacctgtggttaagggggaggcgtgcgccctggagggacctccaagtcacactgctatggggaagaagaggggcaaggaatgttgcacactctcacctttgaaaagcagctccacaaacccagtgagatcagattccaacaaaggcgcacgggcccacaccaagcccgcagtcccatggggtacagcaaatgcaatctggccttcatttatgctgcacccaacaccaactgcccaagagggacgtgaatgctgacacacatccccgacaggctgataaggagctgtgacaccatgtagcaaaaggcaacagccccatgggaacctgcccgcaccaagacgccacttggctctgacttgattctgactgaacgtgcagcttgtctgaaggtcgggcctcaggtgtgtttcttccactcagaaaacctgcctgcccttcggcccacctggagatcgacccccacagcgtgctaagacttccgtgcagagaaatggctggacgcagccaaggggaggcaggcacaagacctcccactgtgggcgacgcagagaacagcaacagaactggaggcttcccctatggcccccacccacaccccctcaagccccagcaggcataagaaagaaatggctggtttcggccggttgtggtggctcacacctgtaatcccagcactttgggaggctgaggcgggcggatcacctgaggtcaggagttcgagaccagcctgaccaacaaggaaaaaccccatctctactaaaaatacaaaaaaattacccagccgtggtgacccatgcctgtaatcccagctactcgggaggctgaggcaagagaatcgcttgaacctgggaggcggaagttgcagtgagccaagattgagccattgcactctatcctgggcaacaagagcaaaactccatctcaaaaaaaaaaaaaaaaaaaaaagaaagaaaaagaaaaagaaaaaaagaaatggctggtttcccaagctgctcccccgagacacacccaccagcagaacaaaagcctccccaggtaagtccccatcctaatccctgggacctgtggccaggccacctcactcagccaatagactgcaggtgcgacttgaacaaaggaccctgagggtgggtgaacatcttgcattatccgggaacccagtgtcctcacagggtcctttaaagagggaggcaggagggtgagagtcagagagactggaaaaggctgtgctgtgggtttgaaggggaggaaggcgccctgagccgagggatgcaggtgcctccagatgctgggaaaggcgggcactgactctccccggaagccttcgggaggcccagtcctgcccacagcttgacttgagcccagcgaggctgactttggacttcccagcccagcgctgagagagagtgtgctgctttaaggcccacggggacgaatgcagcctcaccgggtgatgaaagtgcagtggaaaacagctgcccgctgcctgtacctgcgaaggcggaaggcccctcctgttcccgggaaccctgcagggacagcgggaggccgggacccggaggctgcagaggaggtgggaggaggcctggtcacgggcagctgccgcctttcccttgaaatcacagcagtgttgtgcccatctttaaaattacatttagggaccaggcacggtggctcacgcctgtcatcccagcacggtggctcacgcctgtcatcccaggcacggtggctcacgcctgtcatcccagcactttgggagaccaaggcgggcagatcaccagctcaggagttcaagaccatcctggccaacatggtgaaaccccatctctactaaaaatacaaaattagccaggcatgggggcgtgcacctgtaatcccagctactgaggaggctgaggcaggagaatcgcttgaacccaggaggcagagg[187 bp omitted]ggcgagaccccgtctctacaaaaaaatacaaaaaatgagctgggtgtgatggttgcatgcctgtggtcccagctacttggaaggctgaggtgggaggatctcttgagcctaagaggtcaaggcttcaatgagctgtgatcacaccaccgcattccagcctgggcaacagagcaagatcctgtctctaaaacaaataaaattaagtagcatttagacaagaggaaggatccgtgtgtctgttttggaccactcggaactccgcgggactgtgtggagggccacgaggtacgggcaggcaggggaacatcacacagaagccacaggttcttctttgcctgtgccaggctacagccaaggcatttccaggaaacgtcaccccatgtgcccagcaggcgcagaggggcccattctggcaccatctcacagccaaggaccctgggagtcagcgagggcacccaactaggatcagcaactgtggctgccagttcctctgtgcggggagggacagctgccaggccaggaggatgctcccggcagggaaacggccggctggggctgggtgtcagcccccacccagggggagggctgcggaggccagcagcagctcaagggcgccctcccggcccacttcactgggggaggctccggctcctccctgacccagccggctgcagagcacgccaccctgccacccgcctggtgaacagggcaactagtgccagccctcccccagccccggaagcccggctgcccagtgacgtggaggggccaggccaaggccactgtggcgtgagctgcagagattcatgaaggggaggtgacagagcacaattactgaggaggagcaaggccaggtcagggagacactggtctcccctcccaaggctccagctaacggggatgcagagaggaggaagagcccgcctaacgggaaggctctcctccccaggcaggggtgggcagcagtgagactgggccccaggagggcaggcgggggtggaggggactgaggcatctctaaggggctaaggataagggactccactcaggggcttccacctccttgtcctggaccccagggctctaagacacagcctgcaagatcaacccagcccaggggagccaagagtcacaggcaatacacacaccagccagcagacacccgcgagcccttcccaaaggaaggaaattcagacctctggacattgtggactctgaaaggagagaccatttccccaaaaggtgcttttggaaggtcttggaaggaatagcacctgcctcccaggagtggagccaggcccccaagcagagcgcaggacaggtgataagggtccaatctgggggacgtgggcttgtctttctaactggaagcctgtgtgagtacttgttttgttgttttgtggagacaggcattgcccaggctggagtgcagtggtaccatgatggctcgctgaagctttgcctccccggctccagcgatcctcccgcctcagcctcgcaagtagctgggaccacctgcgtgcaccaccacatccagctaattcttttctttttttggtagagacgggggtctcgctgtaattgcccaggctggtctcaaacttctaagctcaagcggtcttctcgcctcggcctcccaaagcactgcttgtcttttaagggctgtgaaacctgccccagcctttagccaacagatgggaaagagcaggggcacctggaggccggagggcacactctgcagagggggtttcagcattttcactcccgggtggaggctgctaccacctccacaaagactgcaccaaaaagaaagcaggcatgctaggcgggtccgagaagactgagatcaggatctgcaccacggcctctcctccctgtggtcactgggctcccccaccctgcagcctgtgacccactggtgctggaaggcagcatcctggcctgggcgctccagccaggtctggaagtttcacacaggaagttgcctggggctcggccatggctgcctgcagctcagaacagggggtacggcgtgctgagcccctgaaaggtcacctgaagctggtacacaccactgcctccctggacctccctgtcccaccatgcctcagagggttggatctgggtacctgtcaggactggaaaggccccagggtggcatgtgcatgctgctaggtgccctgggagcccacccagggggtcacatctaaaggccgagtttgggccaggcgtggtggctcacacttgtaatgctagcactttgggaggcggaggcgggaggatcaccgaggtcaggagttcgaaaccagcctggccaacatggtgaaactccacctctactaaaaaatacaaaaaaaaattagccaggcctggtggcaggcgcctgtaatcccagctagtcgggaagctgaggcaggagaatcacctaaacctgggaagtggaggttgcagtgagccgagaacgcaccactgcactccaacctgggcgacagagctatacatgcatacacacatacatacatacatacacacacacatacataaatgaatgccgactctggaagtaggaggggcccgtccaggccccgtcccacggctgggaattactttggataggagcaggtgggctccttcctggatgtggcccaggtcagtctgtttctgggaaacatggtgaattggctgacaggaaaagcctacctccagaggcctgggagctgccccttcctccctgcttcaccccaaggccaggactgggaggtaccacccagccccagtggtcctgagaggccacaacgcctggctggctatcttccccagcctctccagccagggctcagcccagggcaacgcagcccagccttgtcccggcctaggagagagcccactccctacaccacccatcctgaccgcatctcctgagaccagtgccctgcagccccgggacgggctggatgacaaagatgatatttcttcccagggttctaggtgtggggcctgggaccagcactatctgcccaaggccatctcctggcccccaaaccttcccttggcccagaaacccctcaccctgggcatccactctcctctctgctcccactgcccccgccccaccacactcaatccacccacacagctgtcctgtccccagcaatggggagaacctggcatgagctccaaccccacacggagactgaaaggcagcaaaaatgacaagatcatggagcacgaagatcccaacctgaacttccagaacgttctctagtgagacccgtccaaactcctgtcttctctcagtcagcccatttcaaagatgaggacacccagtgccagcgagagccggcagctcctagccccacaaggagccccaggcccctcccacccagacggggagactcagtggctctaaagaacccggcaggctggctggacacgatggctcatgcctgtaatcccagcactgtaggaggccgagacgggtggatcacctgaggtcaggagttcgagaccagcctggacaataaggtaaaaccccgtctctactaagaaaacacaaattagccgggcgtggcggcaggcgcctatagtcccagctacttgggaggctgagacaggagaatcacttgaacccgggaggcggagactgc[131 bp omitted]gggctctcaacgcaaccaggcatcagcaggactggcccctccagcccaggcagtgggccccgcatgctggcccagaacaggccaggcagagaccccagatggaaacagacagtccctcccgcctggggcttagctggacaaaaaagataagcctgacactgcggcatgagataagcaagactacccccaacctagcccctgggggagccatctgggcggcctgaggctttgaaggtggagacagaagaggacattcccaaaacagccacagcggcagagaaggcacggggctgaccctcgcgaagcgcaaggcaggggctggttgtgtccacgggagcgcccatcccataacagaccctctgggaagaggggtctggaggacagcacccctgaagtccacctcctgcggacggcagagtaaccataaggtccccacaaatggccatacgtccactctgggggtccctgctcctggggcctcccctccaaccctcacagtgggacgtcctccagccccatccttggacatgcgggcgcccggggccctccatgcacagcccactggacagataggaacccgctgctcagaggcaaagggaccagcactctgcacccagaggaggtcccacagctcctagaccacacggggcagaaacagggtcacctggagagggcttcgaggaaaagtccagccagtgccgggggcctggacctccaccacccagcagcttccaataccctctctgaaatccaaggtggcccagctctgccccaccccccacaccagactccacccaggtctcagagcttgctgtggaggctgggctgtgcctgcagcagcggcacctggggtctaccccactgcccccagggttctcctcgacccccagggctgcgatccgagcctcccctctgctccaaggcaccgccctccccacctcgacagcgcagtgtgcagtgccaggaccgcccagcaggtggagccacacggcagggtccaggggagaaaaagaaaaaggtcccggcctgaccggggaccaccagctctgctctctggggcgtcctgggcatttattcacctcatggggcggccgtccccacatgccatgactggacgcgctgctgtcccaaggcttacagctcgaggctaggggacagggacggtaaccaggacagaggtcactgcctttcaaaacaatgtagaaacaggctgggcgcagtagctcacggctctaatccccgcgctctgggaggctgagcccaaggccgaggcaggtggatgatttgaggtgaggagtttgagaccagcctggccaacatggggaaaccccgtccctactaaaactacaaaaaattagccgggtgtgggggtgcctataaccccagctactcaggaggctgaggcaggagaattgcttgaacccggaaggtggagtctgcagtgagctgagatggcgccaccgcactccagcctgggcaacaagaacgaaactccatctcaaaaaaaaaaaaaaaaaccagctgggcgtggtggctcacacctgtaatcccagcactttggaaagtcgaagcgggcggatcacctgaggttgggagttcgagaccagcctgagcaacatgcagaaatcctgtctctacttaaaaaaatacaaaattagccagctgtggtggcacatgcctgtaatcccaggtaatcccatgcctgggcgcagtagctcacgcctgtaatcccagctactcgggaggctgaggcaggagaatcgtttgaactcgggaggcggacgttgcggtgagccgagatcgtgacattgctctccagcctgggtgacagggcgagactccttttcaaaaaaaaaaaaaaactgaaacagaagggtacaaatggcaaaggacaagaaccggcagggaggagccagcgggaccttctccccctatgcctctccatccctgccaagagcccaccttggctgtgagccactttcatggtccacacagagtaagttaagagtccagctctcagccgggcacggtagctcacgcctgtaaccccagcacttgggaggacaaggctggtggatctcttgagcccaggagttcgagaccagcctgggcaacatggtgaaaccctgtgtctactaaaaatacaaaaatcagcagctgggcacggtggctcacgcctataatcccagcacttcggaaagctgaggcgggcggactgccttgagctcaggagtttgagaccagcctgggcaacacggtgaaactctgtctctactaaaatacaaaaaattagctgggcgtggcggcgtgctcctgtaatcccagctactcgggaggctgaggcaaaagtatcacttgaacccagcagcggaagttgcagtgagccaagatcacgccactgcactccagccagggcgacagagcgagactctatctccaaaaaaaaaaaaaaagagtccagctctcagctcctcctcatcccagggccttttctgtccccaaaggacatttcccagtgggtgtttctgggactcctgtgctccccgtcaggcacagaggactaaaagcatccaggagccctgcagcctcttccaggggctcacagagaagctggagtgggcacctccacggggcgctgcccctcagccaggggttcacaggctgttcctaggatgggtgccgtggcgcctaaggaggaacccacacaccagggtgactgcaagcacaagctgtttttgttacttggtgacctgtgtgcagatgctggggggacggggtgctggctggcaatgtgggccgaccccggccccatcattcattcctccagcacatgttctctgaatacctgcccaggacctcagagagggcacgcagcctgcagggcacaaagggcagggccctccctctctgtctcatccacttccccaaagtccacttcctccaggcagccctccgaagtcctccctgcagaagcagcagtgcctggcatagtgcctgggatacagaggtggaaggcatggtggagccctcacctcactccacctcctcggccgtggtgcacggggcggtggccaactcaggactgcgcaggcccacttccatggcttccagatcctgtctccctagggcctgctcctgaggcagtgctggctcccttttggtctctgagggcctctgagccactgtgagaggaggagggaggggtctcagaaaaatggactgtgacccgtgaccgttaacagggtggggatggacctgtcgccaggacaaatggacaggctgggaagccacagggcggggatacgcctggagtgcacgccaggcccacacccccaagcacacgctctctgccaccttcctggccctgccccctgccaggctcttctgagcaccccagcgtcgacggagctggcccagggcaggtgtctgcagagatctgaggaaggaaggaaagtgggaaggggaaggaaacactgacccagaggcacgggcccctccacacctgcagcacaccgactctccagacatgagtctctgtgggaacaggaagagactccagaaagctgagaatcgcagactgcccaaccgcaggagcgctcccaggctggggacagatgagacagcatatcaacagtgagccccatcggcggcaagctcccaagcagccccaagcccagagcaggagaacatcccaggctttcctcgagctgtctccatccccagagcccacagccctaatcccacttccagccacaggcaaactcctattcatcctccaaaacccagcccagtaatcctgtgtttggaaacactcgccccacccccctgcaactctgagtgacacccgggcccgccccacgtcacccctccactccctgcaactccaagtgacagctgccctgtctcctggacccgggcccaccccacatcaccccctccgcttctgcttcccgagtcccctcagcctggcgccacagacactgagtctagatggacccagacagggccttggagggcaccaggaccagctcctggctttacagagaacactgaagtcctgtggtgtgtgtgtccaggctcagcccacagctcgtcccgagtcctcccccaaccactcctttcctgaggccggaagcaggggcaggtcccagaaccccgggctccaggcacgcagcctgtcatgggacgggaggcgctccgtcctcgcagccgttcccaaaaacctctcggagcctaagggagggatcgccccgaaacagccagtgcacatgcggctcctccaagggtcccagaggacttggctgttagaggaggaagaggaatggcaactcgagaggtccccgtgaggctcagggacccccaggattgccctgacagtctcccttctaccctgtttattttcttttcaggtttttgctttttgttctgcagcagatcataccaacagaatctacccactgcgcggacagcgtaaggaacaagccacggccgggcgcacccagcgctccccggaaacctgcctgctcctctctagggattgctttgcagaagggattctgagggtggggaggagggcggaggaggacagagttttctcgtcaaagtgaggcctgctacagcacagcccgcacgacgcttcccgtcacactcagatgccacgaccccatcgtgcagaagagctcgcagaggccgagggaggttcaggaggcaacaggctcaagggggtaacgcccagcaggaggaggccggggccttcctagcgagctctgccccacagaaagccaagcaagacgccttcattccggggtacggtctccagagggacagaggccggccactggcacctgaacctccagtctgcagtccctggaggagacggtaaagctgcacagggctctggggggagcgctctggggagcggctcaggcactgcaagagtccccggaacccctcccagcaggcacgcttgtccccgctgaccccagccccagcgagctgctctgcctctcccatctcaggctctgggggcagggacggtgcttctcagggtctctgcctctccctacaggcagagcgccagctcagccatccctctcgaaaacacaaaaacaggcccagcacagtggctcacgcttgtaatcccagcactttgggaggctgaggcgggtggatcacttgaggccaggagttcgagaccagcctggccaacatggtgaaaccccatctctactaaaaatacaaaaattagccaggcgtggtagcaggtgcctgtaatcccagctacctgggacactgaggcagaagaatcacttgaatccaggaggcggaggttacaggaagctaagatggagccactgcactccaacagcctagacgacagagccagattccgttgcaaaaaaaaaaaaaaaaagcagcagcagcaaagaaaacacaaaaacagcaggcggggccgccagaccggcatcctcatcctcaggactactgccccaagctagatctctgtctgtggggttgtccccagcactgaagggtgctgagcagtgcccctggcctctgccctctctgtgcctgcacccccaaactggcaaccaaaacatctccagacatctcctaacattcccaaggtgcagaaccgccctgtcgggatcagtcactgctctactgaagacctaagcaaagaatcctaaaatatgaataccaaaaccagcctcgactggcacggcccacgcctggaggcagctccgggcccagcagccaggttttcaaagctgcccaggcgctccggaagtcaggtgaggacctcagaaccttgggaaaagcccccccaaaaaaacagaatccaacctcatctgtgaggcagggtcccagccatggctcaagcacagcaagcccgggacctctggtgtggagtctggaggaggcccggcaagcggcctggtgccggactcggcaaaggaagccacacttctcctctggctcttccgtattctctgatgtttctaaaacaaacatttccccaggccagaaaatagtaccttcaaaagtaaagcacccagagacccgtggcaacacggacaggcccccaggccctgggaacccagcgcttttcccatcgccatccacctgggggagagctgccagcacaatcctgccagcatctgcaagaaggcggctgctctggaaaccccaggcccctttcctctaaccccctccacacaggaacatcaagagtcacggggcagcagagccacccactctgtggtaggagtgtgggggagggctcctcctcctcgaggccagggcaaagcttcaaccccccgcccggagggtcccagctccccgggcccagagccgcagctgggcgaagcttcaacccccagcccggagggtcccagctccccgggcccagagccgcagctgggcaaagcttcaaccccccgcccggagggtcccagctccccagggcccagagccacagctgggcaaagcttcaaccccccgcccggagggtcccagctccccagggcccagagccgcagctggactcgcaggctcgccggcgagggctgaaaaagaaacggcctcagcaccaccgctggttgtcaccactggggtcagggaagcccagggacgctgctcaacatcctacaacgcaaaggacagcccaccagacgacaatctggcccccagtgtccctagcaccaaccgtccctccagcaagctccatagctgccactccaggccaggcaggcaggcggccccggtggcccgattgcccacctgccacccgctggtaaaatcacccccgggtcctcatacgccctggtcaggcctggggaaccaaaagacaatactgctggctgcgggggttctcccctagagtccattccttcctggacgcggctcactgaggatgaaaagtcggaccgaggagagcacacactgtcacgtctctgaaggtgacacaggtggtcagacggtgccttcactgccccacggaaagccggctgtctcccatccaccaggaggaggcagcacaggacgcagccagcgggagctcctgaccctcctgagaggccagaggaaatgaaggcaagccatcctctgcagcgaggcgccattcttggcctccttctcccttctcgcctgactcggggcctcagagtttccgaggagagctggcaagccctaacagatcagtaggatcccagggctcacctgcctagcaggggtatgggaggctgtcaccgacaccggagagccaggcctgcttcaggcccatccttggaaggtttcaagttcccttctgtgcccagcccacagaggctggcagcaaaaacggcagaggaggcaggcagggccccggcccacccacatccaacccagcactgccagttaccagccacgcgtacacaggtgagcagcctcccggcgctgggcctcagtttcctcatctgtaaactgggaagagccactcccactgctgtttgggggtcacaggcagagtccgcccagtactgctgtggtagtggccaagtcaagaggtagggaccccagagcccatgtgaggggccacatctgaagagccagaaggaggaggacccctgcctgacccgactctgctagaaggctcaggagatactgggtacatggtggctgggcttcaggagatattgggtacacggtgggtgggcttcagtagatactgggtacacagtgggtgggcttcagggctccccatgtacctggggctgctccctgagcgcctctaccccaggactcctgccctctacagatgcagttctggagagtcgcctggagccccagctgggacgccgccaacagccccacccagaaccactggcaccgggctgccagatcctgaacccgactgcgggatccccgagggcaggagctgtgcgccccgcacacacgtctgccgctcactttgcagtataggatggccccttccccaggcctgggactgtcctgctggggcctgagtcagcctgtggcgcagcactagcatcccctcaacgtggtgccctcagcctctgcctccctcaggagaagcatcatctgggagcacgttcctgccggagctgtgaagccctgagctggggcccaccgcacctctggagagccctggactttcctgcaatcctccccggaagggttccctctcctggaagacagtgtcctgcctctcagtaggacacagactccctgagacaccacagggagtgcggggcagtgggcagaggcctgggttctgaggtcagatgggaggaaggtgggatctagccctgcccactccacatagacaaccgaggcccctcacctaccaccaggctgcagccaaggcccaggcagcagagagcggccactggggggatagtaacgctcattcccaactcacaaggctgggatagaacgtgcccctctaggccggggatgcacatccctgcgtcccagggctacacggtgcccgccgtaagggctgctggaccatccctccaagccaccctgggcaggtccagccggctctgaaatggctgtgcagcccagcgcggtgcttcacgcctgtcatcccagcacttcaggaggctgaggagagaggatcgcttgagtccaggagctcaagaccagcatgggcaacaaagtgagaccccgtctcggcaaaaattttaaacattagcgaggtgtgatgtcacatgcctgtggtctcagctagtcaggaggctgagccaggtggatcccttgagtccaggaggtcgaggctgcagtaagctgtgatcgcaccactgcactccagcctgggtgataaagtgagaccctgtctcaaaaattaattcattaaataaaatggctgagcaggtccagggataagagcccagaaggaaacctgagtccttcagcagtgctgctcaaggtcgccaatgacccgctgagcctgtgacccagggcccaggagcaccagccaccttcctgttcccgtcgcagctccgccaagcctcccaaccctgcctgccttggtgccctcatcagatgccctctccttctcccagaggccctggaggctccagccctgccctggccaggtggtagtatgggcaaaacacgttcctcgataagcctccgtttccccaccggcagcaaatagctcacagggtcaccatgcagcgcgtgtccagcacagagcatggccccacaggtgctccagggctagctgagggcttttcacctgaacctctgtccactctcaatcctgggaggccagcgttcctgtctatctcctctctggaggccgctgccctgtgcaccctaaaatccccttgagaagacatggcaaaggctagatcacgccagcctcttcaaatctcataggaaactgggtgtgtgtaaatctggaggtgtggacatgggacatgcatccccccctgtcctcagagggcagcctgatgaacatgtcacggaggcggaaacagagggtcagagaaacctcaccgcaaggaagatggatcctgccttctgcggggggaggcagtcttctaccagacagtaacaagaagccctaccaccccaccagagatgggaaaaggagttcattctcaccagcaaaagggaaatgcagacacgccatggtaagaggcaggcagctgcctttttcccataggaacggggggcagacaggaagacgacatcaccaaagggaccctcaaaaataagcctttgggaaacaaatgagccatttgggatgcagacagatatcataagcctgacttgcgccgggtgcagtagctcacacctgtaaccccagcactttgggaggccgaagcaggaggtcggctcgaggccaggagttttgagacaagcctggacaacatagcgagaccctatctccacgaaaacatacaaagttagccaggcttggtggcacccgccgcccatagtcccagctactcaggaggttcaggcaggaggatcccttgagcccaggaggtcgaggcctcaaagagctgtgatcgcaccactgcactccagcctggactatagagtgagaccctgtctctaaaaatagggttaaaatgagcatcgtgagtctggtgtcacagcctccgagaagcctctcccacgcgttgccttcttcaccaactcccagcccccgccaaagccggctgcgtgctcccaggacatcacgacctatgctacgggatctgtaggcacagctgtcggcaggtccctgagagcacagccggcatcgtacgcagctctgaatcccccgcctcaaacacagcgaagacgctgggctgtggggagctgacaagtgattgcttgcatctgtccacctgcaaacaaccgcccacaggtgcaggtgtcccaagcacacttatcagggaaatcagaaaaaaatgctaccttttctggcaaaacaggaaaataaacctattcttaaatcctagagaagatgtttctcttttgcaggaaaaggttctgagctgagactgtttcatggttaaagtaaaaacagtgcttgaaactcacgcccaatgaggaaatctgggacgaaggaagtcaggggctgggtgaagcagagagccactatcaagggacagaggtaacaggggagtctgaatgacatcacactcgataaccctccctccacgactttccttgcgatgtccctctttttctccaatccaaatcccacatctcctccaagaaacgctgccatgacgatgaaaaccaccatgacgctgtgaggtggagtccaccaacgtcctctgcccgaccaaaagcatggaattcctcggagcccactcgagtaagctttgacttcctccctgccagtcatgctggacacagggctcgacaaacacaagagacgatcctcggaccatcctaactcaacgactggagactgaggtggccgctgccagaggcgcggccggaggaaacgtcatggaaataaacaagggcggccacaagcacatggggtccgggaagcggcgggcgccaatcaggggcaggaggagtccaggacctgcctagcgccggccgcgcccgtctcccgagcccccttgtgtcaggcccggtgcccggtactcaacatgcgctcgcactccgccctctagacagccctggcaggacgcgtcctcctagttgacatttcacactcgtgaagacgaaggcttagggacatctagtgctttgcaccgggtcccagggtgggtggttccggtcccgactgggaaaaccgtcgcccgcgaacgtgtggggaggaggctgggccgagaacggggaccccgggcgggaccggggtggggtccagacccgggcaggggagccgagcccaaggcaagcaggcgggcgggcattacctgctgcggggggcgcctctccgccgtcaccgggcgcgccggagccccgggccccgcggtgccggaagtggcagtagggccgccggcagggccccccgggcgccccagaccaataggggcagtcaatggcccggaagaagccagtggagcgtagcatggtccgtcccgcggcggggccccggcccggagccgcccgggccccagggccccctcactggcgccgcggtcgccgccgcccgcgcctcacggaccccgccgccgccatcttgctccgaggcccccggaggccctcgggacgccgccgcaagggaccccgggaggggctgcccgcagcgcgcctgctcagaaacgcctgctcctgcgcgaccaaggctggtgacggacccctgggccgggacagacggccgcgggaggaagtaaggagggcaggggctgccctgcctgcggtctccgggagcctcgccagcgccgccgcccgaccttcggcggctgtagcggcgccatcttgagccccaggcccctgcggcgccagggctgtccacggcgcgcctgaccaaaaaagccccgcggggcccgctattactcatttgcatattatttcctttcgttagcatatcaccttaaggcgccctctgctggacgaggagagttctgcggggaggtggccttaaacctgggccaggtgaaactcatggttgaattactccgttcacagtctttaaaaatcccctcgccctggtatacagctggctctcaagaaacgccttaatctccccaacctcgactcttgtcatcagtctaatgaccaggtccacgttcactcatttgttcaacaaatattgagcgcctactgtataccagctagagggtgcattttaacagacaaacgaggaacaaggctgggatggggcaactctgtagtctggtggagtaggcccacgtcttaatgggaagtttaacctggtgcattttggtgggattgtaaaatagtgccactgctatgtaaaacaaaaaacccaaaaagtttgtttttaagagacagggtcttgctctgtcacccaggctggagagcagtggtgcgatcacggctcactgcagcctcgacttccctggctcaggtgattctcccacctcagcctcccgagtagctaaaaccacaggtgtgcaccatcatgcctggctaattttttgtattttgtgtagagatggaaaaagttaaacagaattaccctatgagcaactctattcctgggtatacacccaaaaagaatagaaagcaaagtcttaggtcgggcacagtggctcatgtctgtaatcccaacactctgggaggctgaggcgggtggatcacttgagcccaggatttcaagaccagcttggccaatatggcaaaaccctgtcctactaaaaatacaaaaattagctgggcgcgatggctcacgcctgtaatcccagctctttgggaggccgaggagggaagatcaaccgaggtcaggagtttgagaccagcctggccaagatggcgaaaccccacctctattaaaaatacaaaaattagctgggcgtggtggcgggcgcctgtagtcccaactacttgggaggctgaagcaggagaatcacttgaacctgggaagcggaggttgcagtgagccaagattgcaccactgcactccagcctgggtgacagagtgacagtccgtctcaaataacaatacaatggttaagatgacaaattttatgttatgtgcatgtgattttaccacaattataaataaatgacaggatgcaatgatgaggggacgtgggttgggatgggtcatgggcgactctgcagaggacctgatctaatctcaaagctgtcctatcatgggcagtggaggcgtagactccctgtcatggctcctgatgatgcgtgagagatgaactctcatttatgcgattgctccatccgtgccggctggtgtcggtcattcattcagcaaatagttactgagcacctactgtgtgccacaaaatgctagaaacatccataagcagagcagagaaccccactctggtggaggtgatggtgtaggcagggaggccgacaatgaacacagcaataagtgagacagcctgaagccaggtggaaagtgctttgagaacagaaacaggagaagagcctggactgggcacagggctggtctgggtgattctatggggaaggcgggatttgtgcggttttacagaaaattaggggccaggcatggtgcctctcgcctgtaatcccagcactttgggaggctgaggcaggcagatcacttgaggtcaggagttcgagaccagcctgactaacatggtgaaaccccatctctactaaaattacaaaaattagctgggtgtggtggcccatgcctgtaatcccagctactcgggaggctgaggcaggagaatcccttgaacctgggaggcggaggttgcagtgagccaagattgcaccactgcactccagcctgggtgacagagtgagacagtgtctcgaaaaaataaaagataaataaataaataaaagatgatgagggagccaagcaggcttctggaggaaaagcattccgggcagagggcacaggccatgggcaggactgcgcctggtgtgttggaggaacagcgaggaggccagtgtggctggaccagggtgaggagggggagagaggcaggagggaagagcagggagaggacggggcaggtcatgcagaaccctatgggcctcagggaggacttgggctttgactgtgagggcagtgggagccatggagggttgcgggcagaggaggaaccagacttgccccaggtgttcacggacaccctctggtggccgtggggaggacaaaccgtgaggagaccagggccaaggtgattgcactggttcaggtgagtcgtgaggaggctagaccgtcgcggtggaagcccttacagcagggaaaggcggccagatcctggatctattttgaaggtagagcccaaggaggtttcagatgggccagatgtgggtggtgagacacacagtggggtccagggtgactccccaaggattttggccttgcaggatggaactgccctcgaccgaggagggggcatggcaagagcagcctgcgggtgggagggacgcccgggagggtcggggtcccaaaggcaccaaaaggatggtgctgcttctgggcacgtgtgtgtgctgggggtggggcgtgtaatttaaaagcctaatgcgagtgtgtccgtcagagagaggggtgaggctgcgagtgtagaccccatattctagacattttgctccagaggggcagaaaaccaggcaggagctggaggggtgcgagagtcccgggagtgatgtttgtggggcgtccggtaggatgggaggatgggtcgggcaggattgggggtgcacgagggaggctgccctcgagtaaagccgggaatttgccgcccaggttggggaggggtctggcgtgagccggcgccggccgcgcgatacgagaggccgaccacccccttccccgggcgggcagcaggcgaagccccagggctcagcaggtgtgtaggagtggcctgcccggccccatcccagccccgccggcctccaggctctggggagcgctggagtccacagtggttttttcctggggagggcctcaaagctctcaccgccccctcttccctattcccactaggggagctggcatacagtaggcgctcaatacaggagcacaggagcctgggaggcggccgggggaccctccgtggaggagcctgtcccgcgccggcgagcagccccgggggcgcaggctcccccatcccctgcggcaccggaaggggcgggcggtggacgcccccgggcgccctgtcactgtgcctcggttgccaggcaacggggcgggcgggaagctgggcggggggcgcagctgcgccaggcgtgggtgacacccggcgggcgcagcgcgcgctgctgcaggcagccccctccgcggggcttagggctaggggcagggcattttgtgtctcagccagaggggcctggccaagacccccttcactagcccgctgcctcggtttccccacgaggtggatgaacttgggaccacactggtgggtgggacagagggattcagagcgtgcccacaggtggggactgccacgggagagaccacacacacgctggagtagggtttaaaaaggggcttgtttaattaattaaatacaaggatgaggccaggcagggcgggggaggggcgccacccacggaaagcacacgcctctcggagccgcctcccctgcaaacggctggaaccaggtcccagtgatcagcgactcctgggagagtggaggggtgggcgcaggtctctccaagcccctggacactggagaggggcccagttatagagttctggaacccacagccctacctacccctgctccagacaggcccctgccagggctggggccaaccaagactcacaaaggaaaacggggccccagtcccccacccacccccacagactaaggcatctcactagcgctgccagaagagggtttgaggctagggacagagaacacagagagccgagggctggatggggcaggaccctccgagcccagctccagaagggcgtcccctgcctccctccccccaggatcccaggcacccatccctggatcctgccaggccggggctgggtccaggtgcacaccagtgccatccaaagcccccctgtccccaagcgagaggcaggacggttctggaacaaaagggggtaccaaaaacctcctgcagccaacagtggggggatccacctttctgggtctgacatggaaccggggacccttctcattccaggctgggggtcctcaataccccccccaagaggaaatgcaacccaggccacagcaggacgaccgctgacaaggacacaaaggtggcccccgaggaacaagtccccaccccacccaagttcagctcagagaccccccacacacactcacaccccctgaggatgccggaccacccatgggggcccagaaaaaaaggaatccgtgcctgaaaaaatattctacccggtgcaaaaaaaacgagctaccccaggaggctgcacagccagccctctgcttccagtccacgaggcaagacctcaaccacgggccaggacccacctcttccaagcacccaggagaaggaggggaggccagggaagcagggccgggccaggctgcagcccaggcccggaagagcctgcaaccccggcgggcatgggctccacggccccacctgcaggccagggagggcagcgcagcccaacagccgcagtcgtcgttaagggagagttgattgtcacgtgataccgcaacggccaaagtcagcaaggcagggactggaggcccaagcccggtgccagcctcccctgcagcctctctcacccacccacccagagagggcgagctagggcccccacacccgaggacagaggaaaataaataagccaggattccctcccgaccccactgagtcaaatgttctttggaagaacccagaggtcccctccctccccatcccaggtctcagaagcaacacctggagcccctccgggcatcctaacgctgccccactcctggctctacccccgaggtctggggggccaggcagcccctaccgtgggcagaacttgtggacacctgagattgagtacccgaatggggggtggctgggctgcacccccatttccctgaactactcccatggctttcggtggggtgggggtggggtggggagaggcaggggccgtgtcaacccccgactcctctatggctgtctgaacacttcatcccaatctgcagggatggggcagggggtgctttccccgggccggctcccagaagtccactccacccccccaaaccccaccccgggaggggggcagcagggggtggtggagaggagaggggaggacctcctagctgccctgggggggccccgttgcacagatgggaagaaagttagtatcatggctatttacagacacaagcccccgtcacccatcctgagagccacctctgaggtcaggcagacccaggtccagtctcaggccccctcctcactctctggaggggggcaggggtgtcttcagggtttgcccacggctggaaggggcccaggctccccgtgggtcctcactacacccctggatggcagaagcatcctggcggtcagggtgggctgcacgagggccctacaggcctgcgggggctgggctgggcgcggggctgggcgcagggctcccggccaggctgcagggcagcgagtcgctgggggaggtactgcgggcaccagggcgccggagcaggtccgggtggaagccggggtggcggcgggcgtgcttggccaggtggtcactgcgggtgaagcgcttggagcacagagggcaggagaagcgcttctcgcccgtgtgcgtccggtggtggcgggccagctcgtcggagcgggcgaacttcttgtcgcagccctgccagtcacaagcaaaagggcgttcccctggacggagagacagagacagacagcgggtcagcgggggcggggggagatgacagacacgttccagcagatcccaaagggtggcgggcatttgtcccgtgccgttttagaggctgagctctggtgtgagttcaaaacatggagaagcacaaagaatacaacccttacccgccccccggtggcccaacacgagaccctaataaataatcctcttatttcctaccagctcttagaaaggactctccggcgagcccagaatctgttaaccgtaagtaaccgccgcagacccccaaggctgaagctccccaggccctcgcagcctctggccccaggcgggaccctggcagggattagcaaaggcctcccagtgtctgtcccaggcacaggcacgctcagaaggcatgctcggccttcaggctgtccctgccccccacccaggggcatgcaggggcctccatctgtgcatgatcccctccttttccaaatgaccacctgggatgcaaaggctgggttaagggggtacaatcatggcaacctccctaaccctcctggcccctccacgagcaagggggcatgggaggaacccgcaggcacagtcagtctgggccccgatctcggggtgtggttagatggaagacaggcaggaaagctcacagggaggggagggggcggggtctcccgggaaggggcggggcccggcgggctggactcgccccacccccacgggacagatggcgctgggcaggggcgggccaccacccggccacttcctccacagtcccctcccaccgccaaggccgggcctcgcccatcctgcccctaaccagccgtcaccatctgggcctgcctgtgcgcctccaggcggtgtgggtctttgctctagaactgtgccacccgaccccttcctttagccggggtctcacgcccacagcatgtggcatcgtgatgtcagcgtctccccagcagataggggtctccaacgactggggaggggcaggtcagtccacctccacccagggaccgaagcaggacaaagggccctgcatccccgaagctcccaccctttcgggccctgcaccaggtaccctggaccctggcattccgggacgttattcccgtgacaccccagggtgggttgtgtggatggagaccggatgtgcatgcccctcgtggcactggttggagccctgagtagcaaaagagacgtcagaaccaactcccctgagtggccccaaagcctattctcaaggaagccacagcagggccaggagggtagtcacccggtgggttacaaactgggcagcccacgcccagcactggaggttgctctggccctgggagcactcccaccggtccatgaagaactgcagccagccaggggcctagaaggacccacagcagggaccatggtgaggggtacagagacggcgggaggggcacggccatgctcagggtgaccgagtgacatctctgctctaagatcaggggctgccctggggagcccagctgaggaggggcacgggagggtggaggggtctgcccactgaggggcaccagcgatcacccgtgacccaagaagagctggaagaaaaaaccttcccttctcatctcatccttcctccctgccacaccccgacaccctcagcaaaacaagactgcagacagagaccagcagcccccctccccaagaggttgtgaatccaggcagctggagagggggagagaccagctgtcaccaagaccaacagtagcctcaaatccctggggctgcctgctccacaccccaagtctcccccaagcaacccaggatgcagctggggtcgcgggtccgccccagctgggggccgtctacaacccaagcaagaggcgcagagcagccctggaagggaccccactcccatctcaaccactgggccctgacagctcccaagggcctcagtctggggacggggtctggctgtgggagcgcggctggagcagaccacgggattggggctcgcgcccctccagggaacatgccgccgtgtcgccatcttgcaaggcacaggcggggaggcggcaggagggaagggggaacatcccacggctgggtgccggacagtcagttggttcacttcccctttcagggcggcggggctggtctccactccctctcccccagttccactttgcaaggaggagcaggttgccggggtggggggggcgaccggggcaggggcgcgcagccgctgggaacacagctgccgcacgtagctcggcggcggcggcggggacatccgcagccccagccggccccgctcacgtggtcccactcccgccggggccagggggcccgggccagggtcgcctctccggcctgggtgcctgccagccccgccccgcgcttggagactgaggcgcgcacatgcgcacgtgggtggcggggcagggggtgcacgggctacccacccacgctgcgctgggcgaagcgcctctgcgaaatgccaggccctgcctcgcacacaatccactcgcagggaggagggtggggtgaacttgtgggggcccagagcgcgctgctcctagccagccgggcccccaggtgcacagccacccagctgctccgcgctacctggccgagacgcagcgccctgaggatgcggtgggtggggacaacgcgggagggcagtgtgggcggggccgcggtggacttgaccctctgactcaggctgggcccgggtgagctcaggacagcctcggaaacaggcaggctcagaaaaatggagtccaggaagtcctggaaacctggcccggccccgtctgagccggcacaggaggggcctggagacaggactgcgggactgtgccaagggccctggttccgacagggaagcctcacctcctgagcttgtctggggggccttggggtggggaggggggctgtggccggctgcctgccggggcactcacgtccacctaacaggtggggtcgggtctgtaggggagggcacaggtggggaagaccagccccagccgcaaagcaagcatcccaggagagccaggaaaggctggggctggggaggcctcttacccacccagggaagggaggagctcctgaaggtgatccttgagcaggttctatagaacctataggcagctgcttctgggagccgctgcagaaaagggggaacactggtggtgaggccctgccagcctgggggtggggtctcgaatactactgggccatagcaacccccacacccactctgcccctagctcccctgacttcccaaagccaaagcttccttcctcccccatccccactcctccagtagacttcccctttccaaaccccctgctgttcccgccaaacacgcaggcaggcatacccacccttgtgtcaatcccgtacctccccacgtgccacctgccagccaaatcccatcaccttcgggatccgtccaggccccaccctgcccctcccagctcactcctggactagtgcagtagtccagcagctcccgcctgggcacccagactgcgcttggctttcctgagttccgccctggcctagggtcaaaactgatggctgatcctgcccggagcttctctgagcagcagtgcccctcacagtggcctggtgccccccaagcacccttggtcagcttctctgtctttgtaccaggcttccaaaaacgcatgcatcttgtgggtgtaatatctgcacccctgcactccagtgggagcagaaggcaggcacttcattgacggctgggtccccggcaatgcccagcacaggcctggtatacagcaggtgcttaatgcatatctgtggaaaaggagaatgcaggcctaggggatcaagctctggttccaacaagagcaagggcagataatgtttgctcagcatcttgaatactcctgtcctccccaccccgccgccaaactatcactactcccttctacataaaaggaggcccacctgaggcccaacccaggccaggacctcctgcaccagactctgggtacctgggggtcggcaggggacaaccccctcaaggaccctggtgcctgtgtaacctctgttccagaaatggtctaagccagggtggtgccccccgcccccacagctcaccctgctggtatcatgtgcctcctccccaccgatctgggctgcttttatcagagagcctgggtgggggtggttatcgccccccacaaccctgggggagccctccccatcccactagctggggcacctgcaggcagttccagctgctctctgcactctgcaggctggagaggcggtgggtgggggagggcagtccctggccccctaccccccaccccctatggcctggcactgccccactccgaccctccccagataagctgccagttctcccaagctctgcccaccagcactgccatcccaaccctacaggagcgcatagttctgcctgggggtggaggagagaatgaagtggggcatggctgcttccccctctgggcctcagtttccccacccacctgtcctcctggggccctcttcagcaagggatcagaaacctggcaggcactcagacactcctctgcacacctcgtcctgaggagtctccctccaacccagtgcgtagaccagcacgcctcgatccctcccacatctcgtcctgccctcctcaacccctctctgatcctaatcccttctccataaatggatttgcctctgcaaagcccagcctgcctcactgccgcccccagcgtccccaccctcgggattaagtgcagggattcaccttgccgaggtgccccctccccacctcaagtccctacctccacagcagaccccagagccagcacgcccttcctctcccattccctgccccacccagcccagtgggcctcaggctgcctcctccaggaagcgctttccgtcatcactagcatccctgttgccaccccccaccccgccccccgccaccacggacacagttccctaagtcctggggcgcggggactgggatgctgggtgctggcctgcggcaggggacttcagagtgggatacaactgggggtgaccctgcagccccctggggggcacctgacaaggtctggggacatttgtgattgtcacgactggggagggggtgctcctgccatggagtgcgtagaggctggggacactgcataaccccctgcagtgcccaggacagcccctccccagaaaacgatcaggccccaaatgtctcggtaagtgcggaggagagaagccctgggtgagaagaacccttccaggtctgagcccctctcctggggagggtgtcggcaaaccctctggaggtgcaggctgacggtgtgccgggcactggcatgccgggggcggggggggggccctccggggatgcagggggtttggagagcagggagccgacagccagcctctcctcccgcccccgccccaactcgctggctcgctcactctccgtaaccatagcaacggcgtcaacatcacccacagcttccaaagtccttccccgccccacgcaggggagagagagccgagagctggccgggctaggataggggctgtgggccagacccaggggacgggaggtgcagtcctgccgcctgctgcccccatgaagaacatcccactgctcccctggcctccctgctcccagggccaaatgtggccgaaatcacaggtggggctcctccagtgtgcctcagttggtttatctgtaaaaatggggccaggccacgactggtgttccctttacagagaagcactccaggcaggggtgggtgggggtggaactcgttctcaatggcccccgggacagccctgcagccaccggtgactcgggttcgtctgcggatctttcccggcctccactccattcagggacagccctgcaatggggctccctcccaaaaaaacgcatggccttcctgtcccccaaaaccagcttaacggcagccattccctccctcctccgggggctgaaaaaccagaccaccttccactaaaagaggccgtttacacagaccccttggtggtcctgggggctggggaggcccggaagaggagcctggaaagccacaagtatccaaaaccctttggaaaccgaatccaaggtgcctgggcctgggactgccctcccagtccccaaatcgttactgtaaagggggctttggaatgggacgtcagcaggctcaaggggtgggggagggtgccaggagatccgccctgccctcccccaccacacagggtagacggtggcgcgccatcagcacaactgcatccacccctggggatgcccgactgggcacccccaggcctgtttcttactgcaatcccgggataacaatactgccttcccaggactccaaacccatccctcccctccctgctggcttagggaccgctgccccaatacccgggggcctatggaagcgcctcttgggtgccactcagggaggtggccatcccgtccacttaacccagaaactcagaaaacccaaatggagctctcaggccacgccatctggcaagaaaagaatgacctgggtagacaggtgggagtcgctttcccaacaggctcccacttcagccccgtctgttcagatcgcccaacttacccccaaaaagccagggcactcctggacccctgcccaccgcccggagaggcacctccctttctgttcccaacgctgcctcgccatcttcacagacccccaatgtccctccccgcggagatacacggaccccattgccctcaaaaagaggtaacaccctgggacccctccgccgaggatgtgtggctcctcgcagaaaacgcagaccccacccaagtcctgtcttgacgccctcggttcccgtctgtgtctcaaggtgggcagagcctccaggcccctgggaccaggacagggactgagcgaggggtgaaaagagtgcagaacagagagggggcggccggcaggctacacaccaccgcccccacccgccctcctgctctccaccctcaggcgtcccagcgcggctccccataccccaaagatggaccctcaattcttccgcaaggcattcgcggcccctgctcatctcagccccaccactctggacggcccacttcccttcggctgctccacgtgtccctacaatccgagcccacggaccaagcctccttggagtgtccagctgcccaaagcggccaccgctatggctatgaaatagaggcagcatcgcactcttgatagaaatgagaaaattgagacccagatcgggtagaggtcttctgtttggtggcaaggccagaatgccaagcccaagggcagccgcacagctttcccccagccccccaccctccccggaagggacaagcacctctaatgcccaaaccagggccggccatcaaggcccaccgtcccctgttgcccagtccaaactcccagtccagaaagtggaaccctaggaggggacggagtgaaaaaatacagccaggcccaccaggctcccggttcccctcgccgccccggggactgcgctaggaggggcgttggtgtagccgaagcgctccaactacgcgcaccttcccgaatcgcccgccaggtaggggtgaacaaacacgccagggaaatacagcagtgtggacccgagcccctcgagggtcctccaatactatgaagttcccccgcccagactcaggccccaacccgcgctcctagcctcgccctccccctcgttaaaatacagagaacgcagagaaaacgtgccgggctccccccatcctggccccacgccaggtgctctgccgacctctggggagaatccgcgcggccaccccggcggcggcgacgcggttcctcctccattttcacagataaggaaactgaggctgggggagggggagaacccagaaccccagagccggatgctccaaccacggtgcccaccgcccagaccagaacgcaaaagaaaaaaaaaaaaacggaacaaggcccagaaagggagagaggtggtctgcccaggagtctcaatcccgcccgcagacctcgctgggcccccggagcccccgccactgccgccggggcggccatccgctcgccgcccgaccgcgtggccgccacgccccccgcgcgcgccccacccaccgaggccccgccctgccggccggcgcggcggcggcccgggcgcgcccccctccccgccccccacgcgccacgcagtttcggggtcctggcgggggaggggtctcaggcggccgcccccgcaagggccgggatcgcggctgcactcacctgtgtgcgtccgcaggtgcgactttaggtgcgaggacttgtagtaggctttggcgcagtccgggaagggacagcggtggctcttggcggcggcggagggcgcggcgccgggggcgcggcccgaggacggggacgaggcggctgaggaggaggaggcgggcgaggcgccccccggggcggctccgggtccgccgcgcaggtcggccaggatgctggcggccagcaggtggggcgccgcggcggcgccggggcccgggccagaagcggcggggggcggcgggggtggccccggggtcccgggtgaggcggcctcgcggcgcgccgcgcgcacatccaggccggcggcggggcccgcgccctcggggccgggccgcccgcggtgcaccacggcgcccgaagagatggccatgagcacgtcggcggcgaagtaatccacgcacgccacggccgccgacatgccgagcaagggcgcgcggcgcggcgggcggagcggaggcggcgggagcggcgtccgtccggccggcggcggctgctcgagtgcgggaggcggaggaggaggaggaggaggcccggcgcgcgccgccgccgacgcccgcgctcggcctgccccgccccgcctgacgcgtcctgacgcaccggagcccgcgggggcggccacagcccgccccgcccggaggacgccccctcggggcgccgcagccacgccccccgcccggcgcgccctccaccactctccgagccgcgcgcggccgccgggggcggggctcgggccggaggaacccgccccccggcgcgcccactccggcctccgccagcgcctagcgtcttaggcccggagcgcgccttctccgcgctagggtgcaaggccgggagccccgccccctcccggcgcgccccactccagcgcgcgcccccgtaccctttcccggagcaccaccccctcaagccggggcgggaggccgaggaccccgccccctctccggcacgcccctccttccgagagcgcgccccgccccatcccggcacgcccctccctcccagagcgcgccccgcctcctcgctggcgcgcccaccccacgccggggcgcgcggccggcgggagcccgccccctccccggatgcttccctcctggccccgggcgcgcccccgttcgcgatggaggagggctccgatccccacgtggccggggttggaggggtgcggaagcggccggccccgcccccaggccacgtgcgcgacccttcccccctcttctcccggcctggggccctgctttgaccccgcactcaggcatctgctcgtcctcttctctggggttccccctcgccgctcacagagcccctcggagcctcccggccgagacacccggtatcccgcgcccgcggcggggcccgggagggtggggcaaggctgcgttcgttcctctttttgcacccagttccggagctactagagcgcgccccactgggggtggggagggccggttgggtcccagagggtcgggatagggggacgggaagagggggccgaacgcaaagggctgggctgggctgggggcgcctgagcgggtcagaggttccccgccctgctgggacaccggggtccggggcttctctttccattcccaggcatcgattcttggggttcggacgggaaaactgaggccaggtattcgggcctcccggccgcgaggacgtccaggccaacttgttaaatattaggggggacaccagggacgcggatggcccagttcgcaggcccaaggcggcgggggcacagaaactgggcggcccccctcggtcgcgaccgcgctcccgccccttcccagctccggcggggcggcggggactgcgcagtggccggagctgcctccagggggcggagctgctttggcctgcggcgacctcctgctctgggttgggcatggacagaggccctgacccgattcggggcttctctagccccatcccccgcccacctgcaaccccagctgacgccctgaggctgaccactgttccctgggtcgcccgcactgcgcctgggctcaaccatgcttggttaagccagctgagccctccctgggccccagtaagcccactctacgtggctggacagagcggagccgagagagaggaggttcagcgaagtgtgggagggtacagggtgccctgcacacacttgcccctctcctaggcctgggctccagagccctctctgcacccctaccattcggtgggcgctgggggtcggcgttcctgctcctgctgggcctctgttgtctttgaacttctaggacgatgggccacttgggcaggtcccccaggtccccaccatcccagcagcccccagggtcctggaaccccgcattggcttgtggacaggtgtgtcttgaggcctcagggtccacacccaaccatgcgtcttccactgatgtttcctgggcttagagcagaaccaaccagccctgccctcaaggggcttacagttgtaactgggaggctaacgatggggggcaggggtgagcagcctccaggggtgggccacatggccccaggcaggaccttcactgtgagactccattgtctgcccactccagccattatcagggtttcaagtgagtggcctcatctgcaggtcatgccagccactccacaggcaggagaccccaggtgagggcacacagcccacaccccacccatgaggcttctattcacacccctaagccccaggaacactcaggcaacccatgacccctgcggtgaacacagacaaacctccagcagcgcccggcacagggctctgtcctctcttccttactctctatgaccctgtaaattctccaccgggtgcggtggctcacgcctggaatgccagcactttgagagaccagggtaggaggatcacttgaagctatcagttcaagaccagccggggcaacgta[137 bp omitted]gtggtgaaatcccgtctctactaaaaatacaagaaaaaattagccgggccaggtggtgggcacctgtaatcccagctactcagaaggctgaggcaggagaatcgcttgaatctgggaggtggaggttgcagtgagttgagatcgaacattgtacttcaacctgggcgac[226 bp omitted]ggggtaggagaatcgcttgaacccaggaggcggaggttgcagtgagccgagatcgtgccactgcactccagcctgggtgacaagagagaaactgtctcaaaaaaaaaaaaaattagcgggcgcagtggcctcacacctgtagtcccagctactcaggaggctaaggtggaagggtcgcttgagcccaggaggtcaaggctgcagtgagctgtgactgcaccactgcactccagcctgggtgacagagtgggaccctgtctcaaaaaaaaaaaaaaaaaaaggagttgtcattcccattctacagatgaaaaaatcaagactgggagaggaccgagaacagccggctcctgctcacagctaagaggcagcagacactttggggcatccataactcagccccttctttcttcaaacctgttcctcacctataaatgggggctcacctctacccttccctgacagcgcccaagaggatcagggggacagctcctcccagccccaaagatggacctcccaagcctgagggctatggagcaaagctcagcaggggacagacagcacccaggtgttgctgggagtgggtctctagcagggcaggaagaacacaacgggactctcagaggggccacggagccaggaactggggccttgcctcatagagggcaaagaacacagtctcccagaggacagatgagggcagaggtcacataaccgggggtgcacccacaacatggataccccaaggtaggtgagggccaaaaacaaggctgcagggccgggtgcagtgactcacgcctgtaaccccaacactttagggggctgagatgggaggactgcttgagcccaggagttcaagaccagcctgggcaatatagtgagacccctgtctgcataaaaaacaaattcaaaacttacccaggcatggtagtgcacgcctgtggtcccagctcttcgggaggccgaggcgggaggattgcttgcggccccgaggtcaaggctgcagagagctgtgatacaccccagcctgggcaacagagcgagatcctgtctctaaaaatagtgatagattgtctgggtgtggtggctgatgcctgtaatctcagcactttgggaggccaaggcagatgtatcacctgaggtcaggagttcaagaacagcctggtcgacatgatgaaaccctgtctctacgaacagtacaaaaattagccaggtgtggtggggggccgcctgtaatcccagctactcgggaggctgaggcaggagaattgcttgaactggagaggtggaggttacagtgagccaagattgtactactgcactccagcctgagtgacagtgagactccctctcaaataaataaaaacaatagtaaataacaaagatgcagcagaagagggggtaatatgtaaggacgtgtgtgtgtgtgtgtgtgtgtgtgtgtgtgtgtgcgtgcgcgcatgcactggaactgccatatcttcttgatttaagacagtcgggtctttgctttgtgatagttttaatagtacttttctgtagtactcaaacatttttttttaccatgtgtatttactacatgcctctgaatgtcaacaggcatctaagcaatgcaatgatgggccatttgtcctttcatttttaggcttttctgtatgaaaattcatcttctaaataaaactccccccaccccctgcccagtgtgggctggactgagggactcgctgccgcagaacagggcagggacaggagacgatggcaatgggccccgggacatccagtgaccccacctgcaccagggggccgaggtcaacatcaggggtgaagtcgtcagggtctcggcgacccctgctaggatgtgaggagaaaggggcctccaggagggtgtcctgccccaaaccctgtcacctca[138 bp omitted]tctgcctcccaggtttcagcgattctcctgcctcagcctcctaggtagctgggattacaggtgcccaccaccacaccgggcttttttttttttttttttggaaatagagtttcgctcttgttgtccaggctgcagtgcaatggcacaatctcggctcattgcaaactccctcctgggttcaagcaattctccagccttggcttcccgagtagccgcgattacaggcatataccaccatgcccagataatttttgtacttttactagaaacagggtttcatcatgttgaccgggctggtcttgaacccctgacctcaggtgatccacccacctcagcctcccaaagtgctaggattataggcgtgagccaccgcacccggccgatgaggggacgttttacagaacacttgagcaggcctcctcaagactgtcaaagtcattaaagacaaggaaagcctgaagaaccaagatagacttttaagagactcaagagacataaggatgaaatgccatgtgggaccctggatgggggccgggccaggaaaggaaaagactttgggggaaaacaggaagctggaacagagagcccggggtttcactgtcagagctgtacccatgttaatctcctggctttagccaggcatgatgactcacgcccgtaatcccagcacttccagaggccgagacaggtggatcacttcaggtcagaagttcgaaaccagcctggccaacatggtgaaaccccatctctactaaaaacacaaaaaaaattagccaggtttggtggtgggcgcctgtaatcccagctactcaggaggctgaggcaggaaaatcacttgatcccaggaggcggaggttgcagtgaaccaagatcacaccactgcactccagcctgtgtgaaagagtgaaactccagctcaataaaaaaagaaaatgttctggttttgacggggtgttaccacaagggaagccagtgaagggttgatgggattctctgcaccacccgtgcagctcttctgtagacctcaaactattccaaaataaaaaatgttttattattgtctttaagatgagatttcactgttgcccaggctggagtgcagtggagcaatcatagcttactgcagcctctacctcctgggctccagtgatcctcacacctcagcttcccaagtaactggaaccacaggtgcacaccgccacgcccggctaaattttttaaatttcattttctagagatagggtcttacttttgctgtccaggctgatctccaacttctgggctcaaacaatcctcctgctttggcctcccaaagtgctaggactacaggcgtgagccaccacacccaacccaagataaatactttttctttttttttttttttttttttgagacggagtctccctctgtcgccaggctggagtacagtggtgcaatctcggctcactgcaacctctgactctctggttcaagtgattctcctgcctcagcctcctgagtagctgggattacaggcacgtgccaccaaacccggctaattttgtatttttagtagagacggg[146 bp omitted]ggtgactggactgaataataataatgacaatggcagcacggcagcagctcacatttgcagcactgcttggagttgctttaaagtccactcctagaaaggcacccaggaaatactcctaagggccagggatggtggctcatgactgtaatcccagcactttggaaggccaaggcgggagaatcgcttaaggccaggagttcgagaccagcctgggcaacaaagcaagactgcatttctacacaaaatacaattagccaagtgtggtgacgtgtgcctgtcgtcccaggtaattgggaggctgaggtggaaagatcactcgagcctaggactgggaggttggggctgcagggagccatgatcacaccactacactccagcccaggtaacagggtgacagtctgacccaaaaaaaaagaaagaaaaaaagaaagattcctgattcctggcctggcgtggtggctcacgcctttaatcccagcactttgggaggcag[134 bp omitted]gaggcaggagaatcacttgaacccaggaggtggagattgctgtaagccaagattgcgccactgcactccggcctgggccacagagtgagactctgtctcaaaaaaaagaaaaaagaaagatccgtaaggaaagagtgcacagggttgtgcactgtactgctggtaacagaaaaaacagggaatggaccccagtatcagcggcggggtcacagagaccctgaggctgctggagaatcaggcagaaccgtcagtcctgctgcagagcctcacagatggggtggcaaaagcaagcttcacagtaaagcctgtgccccagacatggcctcaattctccgtgtgttgtcacctgtacccacaggctgtttattcacggatgacctttgccaacctgtggaagccacctccggacaggcctgcagggacccagggccgtagcaggagggactggacgggctgcggaggtggccatgaggcctgcagaggacgcactcagcggtctgtgccacccatttgagtatctgacggtgtgaccctgacctctcccggtgatcctgattgtcaacaaaaccctaaagtccccacccccccggggctggcgctcctgcaggacactgtggtctggtgatagcctttatttacattactgcaggtgttgcattatgtgaccaaaacgccgacccccaaagccactcagggtatatttctgtgttaaggcgttaaatcacttaccatggtccagtccaggggggccaccacgcacggtggggggcgggggggcagctgcaagctcctgggggacagaggacaaggttccaccagccaggtgggaaggtggggcagcagctgccaccctccaaccggaggacacagcgaggtcaccctgctggccgactgcaaggaagcccctgcgtggggtcctgcagggagcatctctggggtccacggcatccatgctaggagctgcttcagggacaccaaggcctcctccatcctgcacagggtgggcagcaggggcaggatccggctggcatttcctttcccgtgcgaatcccccaacccctgcacccccagcccctcctcagcaggactgcagggccagggccggggattttatctgcacagagtcgggaggggaccaggacccccaggcaccccgcttccttggcctcccaaagatgatgaaaagcttccataagagctttcccccttgaacagggtcagacaggtggcggtggtttttcgttgtttttttaagatggagtcttgctgtgttgcccaggctggagtgcagtggtgcaatcttggctcactgcaacctccgccccctgggttcaagcgattctcctgcctcagcctcccgagtagctgggactacaggcgcccgccaccatgccagctaatttttgtacttttttagtagagacagggtttcaccatgttggtcaggctggtctcgacctcctgacctcaggtcatccaccgcctcggcctcccagagtgctggcattacaggcgtgagccaccgcgcccagcctagtggtggggtttcagggcactctgctaacagccacaggcttcattcacataaagcaccccgcctgggcctgttccctccgtgaggctattggggagggcgggtcccagagtcgcgctcttatcctccacggacacacacactgcctgttctgagctccacttccggctgggtgctggggagagaataggctctggtctggcgggaggtgctcgctgtctggccgggcagatgtgtgtcccgggaccttatttctgagccacctgtgctgtcgtggctgggagacgccgagtgccgagggagcgcgggcctggccggggtctcggctacttctctcggtggggaagcagggacagtcaccccagcagcccagaatcgttgtgaagatcgacgtggcccgtggccggagcccggaaccgggagggaagtgggaccaggggcttgtgctggcccctgggccgctctgataccagttgggcgcccactggatggactcccagttaacaaggcggccctgcactcccaccttgatcctgacacccggactcagaggtggacaggcaggtgcctgccataggggaggaaagaggaggcgcctgctcccagaggccccacctcaggtcacggccaccacaggccaagaggacagaatcacagccaagcagggatggtctccatcctcttccagaaccccagagggccctcaggtcatgcagaacagagccagccgggtgggtcccaccagcttggcattaatgggacgacggatgaatgcagccacagcgtcataagagcttggtcagccgcccacacacacatgctgggaccccacgaatgccagtcggggctgacaggccactggtcccctggggagcagctggagggtgcacagccctgggcaccgccccagacctgacccactggaagggcctagcccacatctcaggcaagcctctgccacacccacagccatgctccagccactggccctggggagggtctgccctccccccgggctccgggtaccagagtgggcctaggccatagggtcacctggctggtgtctgtcccgtcacccagggccccgtgctggggtgtaccaggagcaggtgacacagggtggaccagagactcagcccccaggcgccctacccgggagaacgctgttgcagggcttgaacaagtgtgtcctggaaaatccacaaaatggagaacgggaagttggccctactcccaggtggcctggccccgggccataccaagtgggaggtggggagagcgcgcgtcctggaatagagtgctggcctcccctgtcgccacccctgcggggtcctcccgggtcccaagagcagggggtggtggggagaggccgagggtggaagttggcctgacagcctggagcctgaaggcccggactcggtttaccccatgtgagagggacaggcagagggaacacagtgtacgctgaaggcgtctgggagccctgccgaagcctcggtgctgagttcgcagcagcttgagaatggggctgcctgaaaccaaggccagcatcgcgcaccgtgaatatccacagcccgcagggagggaggggcggccccaaatacttcgatttccaaaatcctcttcatcacagtgtcttgtggaactagtaccacatggatcagatgaagtcgtcaactattttaagatgagaattttatctcagtttgatctgtaaatctaagaatctaagcaatctcaatgttttcaaagaagatcacggtgggagaaccagataaacttgcctgctgttcaggagaaaaaagaaacgtgcaaaataatgcaaggaggaggggcctccggacatgaggtcaggaagacaatggggttctggaaaactgggataagagtctagggacagacccaaatctacttgccataaagacagcacttcagtggggaaaagaatgcttttttgggaaataaagttgggacaatttgtggaaaaaaagttttgcttcctaccttactccttaccaggaatactttctaaaattagacataagcatttaaatatatggggaaaaaaaaaccccactacatttctagaagaaaatctcaaatgttttatgatcttacagcggagaagatattcctgagatgacacaaaaatgcaggagccgtaaagagaaaaaaactaatgaccagtaacaattttagatgcttagcttaaagaaaaaaatacaaacaaagtcaaagactaatgacagatagaaaaaagaaacacttccgggtcagccgagaaatggtattcagcaataaatgtgtcagagtcccaaaaaaaaaaaaaaaaaaaaaaaaaaaaaaacacttctactagacagaaagcgaattttcttaatctgtaaagtgcacctagaaaccaccaccatccacccaacagaaaaatgagccaagaagataaaatacaaatggcttttaaatagtcaaacgtttataataaacatattttccaatctcgaaacgactgtcagtggtaacaatgatcaacgtaacatagatgtaacaggaacatcacgacgttcgactatacttacaggaaacacaagctacagtgaaatactatctcacgcctaccaggtctgcaaaatccagcttgggcaagggtgtcgccggccccctcttatgctggtgggggagggcgatttggtaccacccctttaggggcctaaatacagccctcgcacttctgcaccaaggaatttaacctaagaaaatagtccgacttgggcaaaaaacggtttgtacaagcaatagtcaagctagcattgttcgttataaaagacagcaaaaaccctaaatttctacaggaaaggggataaagtctggtgctataaaactccgtttccggaggaatcccacctgtatctgaatgcatggggcgctctccgagctacgttaagtataagagccccaagtaaagtaactgaccttttgcagaaacgcacgtagatgttcctgcatagactttctttgcagacccgtaagaaacgggtttccctctgccccaggggagaactgggccttggaggttaggactgggaaaaacacatcaagtcttcaccaaataccctttcaggctccttgaattttctactctgtgcacctgaacacacttttgttctcttgcaagcagttgctttgcactggaggcaatgaagacacggcggagtcccagctcgcagggagctcaggttctgacggcgtcagaggacaacacgctctggaccagcgcagcgcccaagggtcagcggcagcagcgagcagggggcacgggatgcggggaggctcttcgggaggcatgaaaggcagacgtgttccgaaacgtgagccgcgctgaggggcacggcgcacgaccggggacagaaggaagacactgcggtcgcaaagccctggccgtgcaaaggccccgtggtcagccaggagcccaggcgtcccctgctctagcgaggtttccttccgaacgtcccgtagcaccgcttaccatggaacggcgggcgctgcctcgcagccccgaccccgcggcggcccccacgggcctacgaggaactcgaggccgagggaaggagtgagagcggccggaaaggggcagggccgagccggaccggtacctggctgggtcccagcggccgccacttaccaccgaggccgcctcttcgtccacagcctgacgccagccaccgccgccgccgtctccactgccgcacgcacgccgccacttccgcttccgtccgtgctgcggccccgcacgtgacgcagcgccttctcgcgcccagactgaagcaccgcccccccttaaaggggccgcggactagagctagctggatgcagcttgggatcccggcctcgccaccgcctggtcgcgcgacacaggctgaaccctgcccaaccctaaggtggacaacaggccaccggttcccgagtcctcccggtcctaagccttctgccctagagatcgtaggaactcttctcgtgatcccagctccagtgtcggctccctcttccaggggagaccctcggggcccaagcacctgccaccgccctctgctggaccccagcttcgccatctacgaaggaagcggcctgtccgagctctgaggtccgtcaagcgcggcacctcaggacccagagtgcgctgtcctggcccctctgcagtaggactgacgggaagctgtcgagggggcagtcccgcgatggcagcagggcccccacgcctggcgtcctcatcgcgcccacccagcagggctcaccagcctccctaggaagcaggcaggggtcctgggctcaaacgctgccccacccatcatcgcccaggcaaccagctccctaagggctccccggactagacagagacccaccccacttccgcagagtaaaacctataagggggtccgtgccgatctctcctagggactcagggacgaaacctgggaaccccggccccctttcgagctcgctgagcgctcgagagagtgagcagagccatgaaaggaaggagagcagccctaaaattttaaatctttaatttccgttttcacgtattttcttcttgcttccaaaaggaaaggagtgcgtagctctgttgcctgtacatcgtccacagcccctgggtcggggcggggtcccctgggccgcccggggggtccacatgcagcccctgggtgggggccggcgcggggtgaggtccgggggccgccttattgctgaggtccggccggttggggccgccgctaggcgcgctggctgggcagctcctgggagatgaagcgacgcaggcgctccaggtactggctgtagagctcgatgtcgttgtgcccggcgccctccacccacagcggctccaccgccttggggcagcgctcgtagagcgccagcccgtgcgagaagtcgatcacctcgtcctccgtgccgtggatgatgagcacgggagacgtgatcttggacaccttctcgatgctgcgggagggtcgtggagccggtgagacttcgcgcccggcccgggccccgccccgcccccgtccccgcccgggccgctcacttagggaaggcgtcgaagcagtaggtcttcttggtgtcggggaaggcgacgcgcatgcccgaggtgagcggcgagtgcagcaccaccgcggcacactcgtagcgcgaggccaggtccacggtgggcaccgtgccgatgctctgcccgtacaggatgatgctgtccgggctgatgccgtacctggcggcgccggagcagggtcagccgcggcctccgacgcgcgcgcacccttcccaccagcgggcgtccccgggcccagctccggatgcgaccctccagtctccccactcagccaagtcagtgggtcaggctcaggctccacaccagtcccgagggccacccccagcccccaacaccgtggcggtgggcgaagccagcggccccgccccgttccctgcgctgccgttcactggcgtttcctagctaggatctgcagggatcctgcctacggagtgcccctggggcgggggtaagggaggccctggcgcctctcctcctcctggtcacccctaggtgcacactgggaactgtgtggcccccacatcctgaatgcttcacaccttcctgccagggttagaaaaccgttcctggtgcactggccaggacagcggacactattcctccctgcagcccttgcccacccccttggccatgaggaattcaggcagctgtgtccccaaatgtctccacccaattttggactctcggagtccccacgcccaatgagatgccagtgcaacccaggtcagcatcgagggtggtggctgcggaggtggcaccccctcccaccagcaccttcccttgggagtggacaagtcctcggccacctcagcaccaccagctcccacccaggggcaccctcacccccaggtcattggtgtgcggcccctgacccagctgatccagcaccagttacaaggcctcctcgtgcccagtcccaagcacacgggacccacctgccaccctgcccatgccgggaccccacaactctcctcccacacgctctaggctctgatcccaggcagacgccctcttgcaaggcaggagcatgggcaggtgtgcgtcccctctgcctggcatctccaccagcagggctgtccccgtccctggcctggaatcccagcctcctggcagcactccacagctcgccactcacccatgccccaaaggatgctgcctggctggtgcctgtggctccagctctgcctcggcctccctggcctgctccctggcagccatggtcagtagtgtgctgagccagcccagccctgccacctgctacaggcaggagccccgagctgccacctggatgtcaccactcaaacgaacaggacacatccccggtggaggccctgggcacgctctggcctccccctcacagctctgggcctaggttcctgcaggacaaagtggcagcaggacagatggccgagcagacagagctcagagctggccatggcaggtgtgactctgccagtggcccaggcagtagagacaggaggggccgaggaagtcgcatgaagtggtgattggtgtcagcgtcccacactgctgggaggcccccagagccagggtggtgccaggggaccagctcccaggcccactgcagggactgcctgcatatcaccaaggcaacgacgaccccacctccctagggcctctgacttctcagagctgtgcctggtccctgtgggagcaggtcagaccagtgggctgggcagggccaggacgagacaggcccagtggatggtgagcaggaaaagccaccagaggcccacccgggtctcctcgtccaaagcagcactggcccgggcggtgctcaaacaccggtgaagggcccaggcaagcgcagggctggggacgtggatgactaggagggctggatctggaatcgaggctggcccagacctcggatgtgtgctgcgggtctgcaccttaccctgtaggccctgccccaggatggccaagctccgcagccacagggcctcatgggccagtcctccggacctggatgcagcagcctcgcctcacttggccccaagtgctgcctcggccgatgggctcccagccacacgtgcacagacccccagaccaccacccactccctcccgccgggtggcatccacacccctgtgacaagctcagccccttcccatcctcaggccaggggttcccagggaacctggctccacaggccagggtgtgggaggaccgcctggccacacctcagccatgtggaggcggcacctgcacacccaagctcgcctgtccggctctctggccctgtgcatccactgtggctcccctcctgcagggccgcccaccttcctcccagggaagcccgccccccggccccccgcctggtcccctcttgggtgtgcccaggctgagctgcccccagggtcgccctcacctggtgcgcagggcctgccaggcggcgtcgatgtcggcatagaggttcctctcggaaggcctgcccgagctggcaccgtagccggagtagtcgtaggagaagatgttgcagtggaggcgggagcccaggccaatgtagaagctgctcatctggcccaggtccacggcattgccgtgcgagaagaggaccgtgtacctgggacaggccgagaagggccgttcacatcctcgctcccagcgcccagctgcagggcaggaggatgcgtagtgacagcccaccccggtggccagccatgcccagtgcctcatttactcccctcccaagggggccagaagccagtgaatggagaggggaggctacgacagcacagctccatctccgagggttccccatggggagaggacaggacagctggcagggggacaggcagcctgggctgcagaggccagccagggagcctcaggattcccatctgtgaagcgggacactgggaccatcggtcgcatcctctctcagggcagactcgcagtgtgtgctcagatactgcaggcttcactgcccttcctcctggaagaacctggacccccggggatggagcgcacaggcccacctttcaggaccttcccaggggagcccatgctgctgctggcagggctatctcccctcacctcacagaatggtgccctcactgttggggcacaactggaccccacccctgcccccaacaagcaaatgcggccaatctctgctcacactcatgcagcccctcctggcccaccaccctgcccaagccccaaggctgtgctgcaaggcctgtctgcttcccagcacgggagctgccccaggtggtgccaggagcaggtggccaggctggccctgccatggactgcttcctccagttcccccaggcccccacctagcccagccagaaggtaaaggctcgccctctggactcagatctggtcagaaccccacctggcgagaaggtggatgtacccgcaggccagggcagcccctgtgccccagctcttgcccagcaggcaaccaccaggcgctgggttgttggagtcgcccagcctgcccacccatgccagctggggatggcctccctgagcctggtgtccttgtctgcgagagaaaattgccagagggacgaggccggcctgacgggggataccacccttgctggctggatggcccttcacggcaggctcgggccctcgggggcaccaccaaccacaccaagcaccgcaggcagaaacgggagccccaagaacagggtgacccagcccaggcgcggccacagctgctcacctggcaccaggcacgcagcgaacatacatgcaggagacgcggttgccgcgggcgctcttggtggggaagacctcgatggtgtccagctcgcgctggctgtactggaagtcggcacgctccgtcaggtgcagcttccagcgcccgggtgcgcccgaggaggctctcagggtccccaagggggcggccccggccccaccaggccccggctcgggctcaggcaccagggagtaggtggcctccggcggcaggaaggcgagcttggcagcgatgcggccggggcagggcgggcagcagaagaggcagcagagctcactcagcgacagcccattcatggcgggcgccgcccaggccgggcctccaccggggcccccgccaacaacgccgcccggcctggcccggcaggggaggggtgggggtgctccgagtcgcgggcaggggggagagcgcccccccagctaccgccccagacagcagccccgttaggaggccagggcccagccccatcgcggtccaagccgagccccagggagcctcgcaaccacaggtctccatgtcgtgccgtgggaagccctgcgggggaacagtgacatgtggggtcctttgggggtgccacagtccagctgggcacccccgggaggcggggcatccacccgtgccagggggcggcatgggcccggggcctgtcagtccccatcccctcggccctccccacggcctgtcaggcactgcaccctacagctcaggggaccccaattcagccccctctccacaggatgaaggaacccccaccttccctgagctggcgatcaccacctcttgccatgtgagtacagccatggcatgcggggcatgcaggggatatgaccccagccccgcccacacccccgaaacgcccggctccagcaccagggaaaccccatgcgccaggactcggtccgcactgctgcccactccctcccccggcccatctctgccaccctatgggtgacgggccgctgaggcaaggacagagctcgaactgaagggacccacgagggacccgaacaggccccgctacgtgagcgtgcacaggcgccgggtcccaccggcctgcgatgtctggagacagaggaaatacaacaaacaaaggctctagaaacaaaggcaggatacatcccaggctcctagggcccccagagcagcaacaatggctcttctctgtgctggagccaggcctgctgaggggcaggggaggtgggctggcgtcagggggtccttctccacccctgacttagggttccgtgaccgtgggcgagtcccttgccctcctgaggcctcagcattctcatctataagtgcagacaccacacaccccacaggaagtcaagtgaggggggaggggaacgaaggtgcctgattgagagtggaaactcggaccttcttccttgctgcagaacgtcatgaaacacattaagtcgacaacagctaagttgctaaagcaaccacaatagtgtaaggacctgccaacagacagacgtgaagaaaacacgaaggtctgagacgtctatctaccgaccacgcttctccttcagactggagcgaggagagagacacgctcacaactcaatttcagcagaacaccctggaatgcttggcttttgggtcacagcatgagaaaaccgtggggccaggaagatgaggctcaaaggcagatgtggacacagatggacatgcaggcagctgcaggcgccacagacacggctcgtggggacaccctcactaccaaggagcagcctcaggcccagaaacacacctgctccctcaggacctgatgtgagacccacgttcctgtgagccggactcatgggcacacgaggaggagaggagagagctctgaaagccagggtggggcaaggatggcatcccagtgcccccagactcccaggcggaaggcaaatcgcacatgcaagcacttttcagccgggaggtggactgtcaggctggttctgcttctcagatggaggcgagtctccctcctggagacacctgtcaatgtctggacacagttttgggtgtcaccactggggactgggtggaggctgcttagcaccctgcagtgcccaggacagacccaccccaaagaatgatcaggcccaacatccacagcgtcgaggttgatgtcagcttttcaacatattctcaaagaggtccaggccctaccggtgctgccccgctggtgctggggacttggagggccctgcagtttaggtggcatcatgcagctgggtcctgagagcccagtggacagcagcaggcccctggagaccccggagacgaaggggcacaccgaggtggccagggccccactatccaggccagaaacaaagatgttatccttgacacctccttccacccactggatctgagccggtccatcaccagcccggtggctctgcctgtctcccatcagccaccgcccggtccctgcctccatcacctttcaccagagccacagcaacagcctccctccttgctgatcacctgctccaggacattctcccccagcagccaaacaatctttcacgacacaaatgcaatggagccgcttccctcttggggtgtcctgggggcctcccattattccctggatagagatcaaagccctccccacagcctgccaggtccgcattccggctcaggccgacctctccagactcactcatctcacaccctgccactcctggctccctcaagacaagccaaattgccccttcctgcctctgctcctctgccaggaactcccttccccaacctcactagacagccttgcccaacccaaccaccctttgcacctcactgccaacgctctcagagtcctcaaagctgggacaggaccccttacacgctctttccacagcttgtatttttcacacgtttggccagatctccccccacctccaaaccagaaactctatgagagcaggaccatgacctgccactcactaaaggaatgggcaggtggtaggcagcacagaattaaggaggaagcacaggaggaaaagaatccccaaggtccgccagctttgacagggaagggaaagtctagtctcctctcctctccagccacaggtacctggaacctccctagtgtcactaatgggcgtggactggggagtgcaaacccagacgcctcactcactgggcacacacccttgacaccctgaatcccaccaattccgttcccacgcacttaactgggcaaccctctgcaagctagaggtgttctgaggaccagcaagcaaccgagcagccaaaatactggaagatgacctacatatgggagacggtgactgcacctcactcaaccagtcagggtgggaaacccgcctggggggaggcgcggccatatcagagggcagacaaacgggccaggtgacagggggatgggacagagggacaagcaggagcaaaatccgaggtgacagagcaggctcctggctagagcagaccctgggaggaagaagtgagcagaagggtcctaagagagagcctgggacgggtgaggtcgcgcccccgagagtttgcacttcatcctgggagaaatggcggggccgcgaagaagtcccgagcaagcgatggacaacataggagaagggctgcatcccggagaacggacgcgagcggaggccgggaagcccgcccaggagtcagggtggcaggaagaagcctgacaagggaaacagcgactgggagctggttgggaagcagggctcgggagggcccctgggagctgccttggggggcgagaggccgaagcgtttgtcggactgggggcagtttcggggcaaaagagcggaatccgcggctcggacgggtgctccccgaaggcaagggccgcgtccgcaggagggtgggagcgcaacccacgccggagggctgaatggatggggacagggctttcccaatcacagacgctcatccgcggtccgcgcccctgctctgggctcctcgggcaggacccgcggaagccctgggactgcaggggtctcggggacgtccaaccgggctgtcaggccctcgaggcccggcccgggaccccgcgcggccgcgcccgcccccgcccctgcccggcactcaccaccccggcccgcgcccccgggccccagggccgcgctccatggctcccggccgcccgcccgtgcgtccgtcggtccctccgcacccctgcccggcctcctgcaccgccaccgccgcagctccccccacggacggaagtgagcctcgttctcaccaccgccccggaagtgacgcgaggagcgcgcggggcgggggtctgcaggcacagagcgaccgcgcgactagcgtcctgggggcggggctgatatgtcgaggggcgtggcctgctgctctgtgggcggggccaaacttaggtttcattcacttggggacccggaataggttgaggccagtaaagttctcgcctggaaaacaaaatttacagggacgccaaaaaaaactcagacatcaacatttagaaatgttttaaaatatttttctttatgagatggagtcgcgctctgtcgcccaggctggagtacaatggcgcgatctcagctcactgcaacttctgcctcctgggatcaagcgattctcctgcctcagcctcctgagtagctgggattaccggcgcccaccaccatgcccagctaatttttgtgttttcagtagagacggggtttccccatgttggccagtgtggcctcgaactcctgaccccagaatcctcctgcctcagcctcccaaagtgttgggattacaggcatcagccaccgcacctggcctcttttttttaacatagagtctactctgtcacccaggctggtgccatcatagctcactgcagcctcgacctcccaggatcaagtgaacctcctacttcagcctcctgagtagctaggactataggcacaagccaccatgaccagcttatttaaagtctttatatattgctcatcagaaattcttttgcattagtttttaaaatattacattaggccgggcacggtggctcatgcctgtaatcccagcactttgggagactgaaacaggtagatcacctgaagtcaggagtttgagaccaagcctgaccaacgtggtgaaaccctgtctctactaaaaatacaaatattagccgggcatggtggcacgcgcctgtagtcccagctactccggaggctgaggcaggagaatcgcttgaacccgggaggcgaaggttgcagtgagccaagatcgggccactgtgctccagcccaagtgacagagcaagaagactgtctcagataaataaataaataaataaataaataaataaataaataaataaaactatgatcactccactgcattccagcctgggcgagagagcaagatcctgtctcttaaaaaaatttcattatgggctgggcgcggtggctcacgcctataatcccagcactttgggaggccgagtcgggcagatcatgaggttaggagatcaagaccatcctggctaacacggtgaaacctcatctctac[139 bp omitted]gggcgacagagcgagactccgtctcaaaaaaaaaaaaaattgcattatggcagggcctagtggctcacgcctgtaatctcagcactttgggagaacgaggcaggcagatcacctgaagttaggagttcagcctggccaacatggtgaaatcctgtctctactaaaaatacaaaaattaggccaccctggccaacatggtgaaaccccatctctactaaaaata[131 bp omitted]gttactggagaatctcagagcgtggtcagggcaggcctttctaaggaagtgacagggacaggggcagaaagggctgcagacaccaaaggggcccagcctggaagtgtgagtgtgaattggtgggaagccttgcttttcaggccttctctcatatgtgccttccccccagctttcgtgccttttccagctcaaaatgctcctccagcctgcaggcaaccgcagcccccgctccgtcccagggactctcatcttagctccactgttctgagataagcctgaggctcctgggccaatcctgcccccaggggctcattcctcaaattcaggacacagctgccagggaaggaatcaggctcaaaagactagagacttagagatagcccagggtttctttgcctcattttctttcctctttttttttttggttgttgttgttttgagacagagtcttattctgtcacccatgttggagtgcagtggcgcgatctcggctcactgcaacctccacctctcagattcaagctattcttctgcctcagcctcccgagtagctgagctaacaggcacccgccactgcacccggctaatttttgtatttttagtagagatggggtttc[137 bp omitted]ggacctctggcgcccctgctcaggactcagctgcctgggtctccctggggctgtcaagagctgccccagcgttcccctgcctctgctgtccccctcgaggctcccagcctccgctgaggttctcctgaggtccaaaggccaaaacaagtccaggcttcttcctaggtccttgtgaattctctgagcaccagggccagaagaggcctgtccccagcctccttcccccctcccatcttccctgcagccccttcccactgtgagctaggcaggaccagggctggaccgcaccagaaagcccagctccacttgtaaacgacagcccccacagggacacagggagacaccatccaaggggaggaggataagcccgcagggtggcccaccaatccaaggccacctggtgaaaggtaaacgcacgctgtaaacactcaaatgtctcagaaggacacccatcccttcctcctccccagagaccctttgtgatcgagcctctgtcccaattgtcccagaaaatagtgggtgctgtggctcatgtctgaaccccagcattttgggaggccaaggtgggaggattctttgaggccaggagttcaaggctgcagtgaggtgtgattgcaccactgcactccagcctggatgacagagggagatgctgactctaaaaaataaaaatgagggctgggcatggtggctcacgcctgtaatctcagcactttggaggctgaggctggaggatcacttgaagtcaggagttaaagaccggcctggccaacgtggtgaaaccccatcttttttacgttgttgtttcttttttgaaatgttgtctctcactgttgcccaggttgaagtgcaggggggtgatcttggctcactgcaacctccgtctcccgggttcaagcaattctctgcttcagcctcccgagtaactgggattataggcgcctatcaccacatccagctaatttttgtattcttagtagagatggggtttcaccatcttggccaggctggtcttgaactcctgacctcgtgatccactcgccttggcctcccaaaatgctgggattacaggcgtgagccaccgtgcctggccgatgaaaccccatctctactaaaaatacaaaaattatctgggcatggtggcagatgcctgtaatcccagctactctggaggctgaggcaggagactcacttgaacccaggaggcagacgttgaagtgagtcgagattgtgccactgcacttcagccagggcgacaaagtgagacttggtctaaaaataaaataaaataaaataaaaaatgaaaatgaggccaggtgctgaggttcacacctgtcatcccagcacttcgagaggccaagccgagtgcatcacttgaggtcaggagttcaagatcaggctggtcaacatggagaaactccatttctactaaaaatacaaaaattagctgggtgtagtggttcaagcctgtaaccccagctactcaggaggctgaggcaagagaactgcttgagccagggcggcagaggtcacagtgagccgagatcacagcgttgcactccagcctgggcgacagagcaagactctgacttcaaaaaaataaaataataaaaaataagtccgggcgccgtggctcacgcctgtaatcctagaactttgggagcccgaggcgggcggatcacgaggtcaggagatagagaccatcctggctaacacggtaaaaccctgtttctactaaaaatacaaaaaattagccgggcgtggtggcgggcacctggagtcccagctactcgggaggttgaggcaggagaatggcgtgaacccgggaggcggagcttgcagtgagctgagatggcgccactgcactccagcctgggtgaaaatgcgagactctgtctcaaaaacaaataaaaataaaaataaaaataaaaataaataaataaaaaaaaatgaaaaaaatcatacattgaaaatggggggagccactagtccctcttccccttcatggtctgccccagccatgctggcctggccaggagtgctgctgcctcagggcctttgcaggtactatggctcctgcctgcagggcccttccccatatggccccctggcttccttctccagcatcctctggctctacaggagggccacaacatccaagagcttctgctaaccaccccagctaaatcccaaccacatacatacacctctaccccattacctctatcccatcaccctgtttatttccactgcaatacttaccactctcagattctcttttttttgagacaagagtctcactctgttacccaggctggagtgcagtgactcgatcttggcccacagcagcctccacctcccaagttcaagtgattctcctgcctcagcctgccgagtagctgggaccaaaggcgtgcaccaccatgcccagctaatttttgtattttttgtagagatgggatttcatcatgttggccaggctggtctcaaactctcaggctcaagcaatcctcccatctcggcctttcaaagtgctaagattacaggcgtgagccaccatgcctggcaattgttgggttttattctgttttgttttttgaaatgaagtttcactcttgttgcccatgctggagtgcaatggcacgatctcagctcactgcaacctctgcctcccgggttcaagcgattctcctgggttcaagcg[133 bp omitted]cggccccccaaagtggtgggattacaggggtgagccaccatgcctgcccaattgttgttttttttttttttagttttatttatgtttatgggaaatacatctgcaagatgtggtggttactctttttttttttttga[134 bp omitted]cacgcctggctaattttttaaatttttagtagagatggggtttcact[140 bp omitted]ccaggctatagtgcagtggtgcaatctcagctcactgcaacctccgccttctggtttcaagtgattctcctgcctcagcctcccaagtctctgggattacaggcccctgccaccataaccagctaattttttttgtatttttagtagagatggggtttcaccatgttcatcaggctggtctcgaactgctgacctcgtgatccacccatctcagcctcccaaagtgctgggattgcaggcatgagccactgctcctggccaatggttactcttatgtgtcaccttgactgggctaccatatatatagctggcacaacatcatttctgagtatttctgtaagaatgtttccgaagagattaacatttgaatcagtggagtggctatacccagttaattttcaatttttttgtagagatgaggtcatgctatgttgcccaggctggtctccaactcttggcctcaagcaatcctcccacctcagtcttctaaagtgctgggattacagacatgagccaccatgcccggctaatttttgtatttttttttttttttgagacgaagtttcgctcttgttgcccaggctggagcacaatggtgcgatctcagctcactgcaacctccacctcccgggtacaagcaatcctcctgcctcagcctcccgcgtaccttggattacaggtgactgccaccacccctggctaatttttgtatatttagtagagacggggtttcatcatg[139 bp omitted]gggccccaggagctgacctgccgtctccatgctcagtcccctcttgacggacatgtagggtgtttctggctttggctgcaacaataatggcacatgagacgtttcacactgatggataggaccctgcagggaggattcctggaagaggaggtcccatgagaaggtccatgctgctgtgttcagaaagcaatcctgggtctccccctgagaaaaccccccacagagggaccgagatagatgatgtgggagaacaaggtactgggtgactttttttttttttttttttgagtaggagtctcactctgtcatccaggctggagtgcagtgatgtaatcttagtttactgcaaactccgcctcccgagtccaagcaattctcctgcctcagcctcccgagtagctgggattacaggtgcccgccaccacgcccagctaatttttgtatttttaat[132 bp omitted]gtagagacagggtttcaccatgttgggcaggctggtctagaactcctgacctccagtgatgtggctctcttggcctcccaaagtg[160 bp omitted]taaataagctttgtgattaaatactaatatttatacttttcagcatatacttacaagaatgggactgggcgcggtggctcatacctgtacttccagcactttgagaggccgaggcgggcagatcacgaggtcaagagttcgagaccatcctggtcaagatcgtaaaaccccatctctactaaaaatacaaaaactagctgggcgtggtggtgcgcacctgtagacccagctgctcaggaggctgaggcaggataatcgcctgaacccgggaggcggaggttgcagtgagccgagattgtgccaatgcactctagcctgggcgacagaacgagactccgtctcaaaaaaataatggaaaacagggatttccatagatatttgcacacctatgtcagtagtaccttgattcccaacagccacaaggtagcaacagtcccagtggctatggacagatgactgggtgaacacagcatggcctatacacacgctggaataggaggcagccatgaaaaggagcgaggccgggcatggtggctcacacttgtaatcccagcactttgggagaccgaggcaggtggatcacgaggtcaggagattgagaccatcctggctaacacggtgaaaccccatctctaccaaaaatacaaaaaattagccaggcgtggtggcgggcgcctgtagtcccacctactggggaggctgaggcaggagaatggtgtgaacccgggaggcggagcttgcagtgaaccgatatcgcgccaccacactccagcctgggagacagagcgagactccgtctcaaaaaaaaatatataatataatataaaaaaagaaaaaagaaaaaaagaaaaggagcgaggctctgactcaggccacaacgcgcggatgcactttgaggacgttacactcagcgggaggcgccagacacaaaaggacacgtcttgtgtgatccactcctaggaggtccctcgagtcctcagattcacagagacacaaagtaggatggaggccgccaggagctggggaggggaatggggagtgagcgtttcatggggccaagtttcagtttgcaaagatcagaaagttctggaggtgatggtcgcacaaccgtgtgaa[224 bp omitted]gagg[138 bp omitted]ctttatattatgcgtattttaccacaaccaaataaatcaatgttcataaaaccacggagttagacgagctgtttggttagcgccagcttcgcaggcagaggcctcaggggtccgctggggacccacactcagaggaatctaggcatgatataatgctctgtggttgctgtctcaaaattcctaaaaattggctgggtgcggtggctcactcctgtaatcccatcactttgggaggcccaggcgggcggatcagctgaggtcaggagttcgagaccagcctgaccaacatggtgaaaccttgtctctactgaaaaaacaaaaattagctgggcgtggtggcgcatgcctgtagacccagctacttgggaacctgaggcaggagaattgcttgaactcaggaggcggaggttgcagtaagctgagatcatgtcactacactccagcctgggcgagagagcaagactccgtctctttaaaaa[133 bp omitted]accccgtctctactaaaaacacaaaatcagccgggcgtggaggcacatgcctgtaatcgcagctacttgggaggctgaggcaggagaatcgcttgaacccaggaggcagaggttgtcgtgactcgagatagcaccattgtattccgactgggcaacaagagcaaaaaaactgtcttagaaaaaaaaaaattctaaacatttttaaacaaggggccctgtattgtcattctgagcttggcctcaaagattctgtagccaggcttcttttggggaaaggaccgggaggcctccttccagggtcaggggcgttaagcgctgcggagggatacccctcccagaggggagagagtggaacccgctcaggaagtgggttcctgacatgagaaggaaggaagttggcgggggcatcttaaaatagcatcacccaaccacgcggtcagaggtgcggggagggagcagggccagggccggggaccctcccagcgaccttccctgcaggcacccagccccgtcccctcgacacaccagacccagcaccctctgctcccaccagcccaccaggaattgggttatttaagttatttatttatttccttattttctttttcttttgagatagagtctcactttgtcacccaggctggagtgcagtggcgtgatctcggctcactgcaacctccaccgcctgggatcacgcgactcttctgccacagccttctgagtagctgggattacaggcgcccgccaccaagcctggctaatttttgtatttttagtagatacagggtttcacca[140 bp omitted]gcccaggctggggtgcagaggcacaatctcggctcactgcaacctccgcctcccaggttcaagcgattcttctgcctcagcctcccaagtagctgggattacaggtgcccgccaaccacacctggctaatttttgtatttttagtagagacaggatttca[131 bp omitted]gattggatttgggcgcaccctcaggacgtcatttgaacctaataatctctttaaaaagtcctgtctcggcgggggccaagcacagtggctcaagcttgtaatccaaatactttgagaggccaaggcaggaggatcactggtgcccaggagtttgagactagcgtgggcaacacagcaagaccccatctctacaaaaaaaaaaaaaaatatttggttagccaggtgtcggggcacatgcctgtggtctgagctactccggagcccaatgtgggaggatcccctgagcccaggagtttgaggctgtggtgagccgtgatcagctcccactgcactccagcctgggccacagagagagacttcctatctccacgccaagtgccttaggtcacgcctataatcccagcagtttggcaggcagagtgggaggat[215 bp omitted]gaggcaggagaatggcgtgaacccgggaggtggagcttgcagtgagctgagatcacgcctctgcactccagcctggaccacagagcgagactctgtctcaaaaaaataaaaaaaaaatagccgggggtggtgtcgggaagctgaggcaggagaatggcgtgaacgcaggaggcggagcttgcagtgagccaagatcatgccactgcactcctaggcgacagagcgagactccatctcaaaaaaaaaaaaaaaaaaaaaaaaaaaaaaaaagaccagcctgggcaactaagagagacctctgtctctgcaaaaaaaaaaaaaaaattttttttttgagacggagtctggcactgtcacccaggctggaatgcattggcgtgatctcagggttcacgccattctcctgcctcagccccccggatagctggattacaggcgcccaccaccacacccggc[180 bp omitted]tccgcactgctgatgagggagtgtgattgttctctgttaccagcactgtctcccgcccaccggagccgagtgtggtgggtgtggaccttctgggaaagggtgtaaacacgtgcttagatccggccggaagccccgtgaccggggtgcagctgcctttggtcagtaggtggcaaccgtgtccgcttgattttgggagggtccgagaggctggtgcagggctcccaggagaggcgggggcgatcccacttgccttgccaggataacagcaacaagggctgcccacgtgcatgctgggcaatagggataccgcagagaatgaaagtccagccctagcagggcagcaagacctcgactctacaaaaatttcaaccacaacaaaaattagctgggcgtgacggaacacatctgtggtcccagctacatgggaggctgaggtgggaggatcgcttgagcccgggtggcaaaggccacagtgagctatgactgcacaactgcactccagcctgggtgacagaggcagatcttgtctcaaaaaaaaaaaaaaaaacaaaaaacaaaacaaaaacaccaaggccaggcacggtggctcatgcctgtaatcctagcactttaggtggctgaggcgggaggatcacctgagatcaggagttccagaccagcctggccatcacagcgaactcccatctctactaaaaatccaaaaattagccaggtgtggtggcaggcacctgtaattgcaactactcaggaggctgaggcacaagaatcgcttgaacccgggaggcgaaggttgcagtgaaccgagatgtcactgcactccagcctgggggacagagtgagactccatctcaaaaacaaaacaaaaaacaccaaaacgtcctgtcctggtggaggtgaaataaatgagacatccttggccgggcgctgtggctcacgcctgtaattccaacaatttgggaggccaggcgggtggatcatgaggtgagaccgagaccatcctggctaacatggtgaaaccccgtctatactaaaaatacaaaagttagctaggcgtggtggcaggcatctgtaatcccagctacttgggaggctgaggcatgagaatcgcttgaacccgggaagcacaggtagcagtgagctgagatcgtgccactgcactccagcctgggagacagagcgagactccgtctcgaaaaaatatatgtatagccaggcgtggtggctcacgcctgtaattccagcactttgggaggccgaggcgggcggatcgctaggtcaggagatcaagaccatcctggctaatgtggtgaaaccccatctctactaaaactataaaacaattagccgggcgtggtggcgggcacctgcagtcccagctactcaggaggctgaggcaggagaatcgcttgaacctgggaggcggaggttgcactgagccaagattatgccactgcactccagcctgggtgacagagcgagagtccgtctcaaaacaaacaaacaaacaaatcagaaagttaatgggatgctgacgcaaagaaacaagctgaacaaggtggtgacagggaagttgatactgattttggcctcagccatgtggaaacagacagagggtcttgcggggaactcctctccttttttggacgcattcctgttttgttttgttttgttttgtttttttaactttcttaatttttttcagttttcgtcacactttgtctaatactatttcttttttgtttttgagacagagtttcgctcttgttgcccaggctggagtacagtggcacaatctcagctcactgcatcctctgcctcccaggttcaagtgattctcctgcctcagcctcccgagtagctgggactacaggtgcccgccaccacgcccggctaattttgtatttttagtagagacagg[131 bp omitted]attgtttcttagccaggccctgtggctcatgcctataatcttaggactttgattttttgtttttgtttttgtttttgagacggagtttccctcttgttgcccaggctggagtgcaatggtgcaatcttggctcactgcaacctctgcctcctgggttcaagcgattctcctgcctcagcctcctgagtagctgggactacaggcatgcgccaccacacctggctaatttttcgtatttctagtagagacggggtttcaccatgttagtcatgttggtctcgaactcttgacctcaggtgatccacccgcctcagccttccgaagtgttggcattacaggcgtgagccactgtgctggctttttttttttttttttctgcgacggagtctcgctctgtcacccaggctggagtgcagtggcgccatctccgctcagtgcaagctccgcctcccgggttcacgccattctcctgcctcagcctcccgagtagctggaactacaggcgcccgccaccacgcccggctaatctttttattttttttagtagagatggggtttcagcgtgttagccaggatggtctcaatctcctgacctcatgatccacccacctcggcctctgtacttttttcctattggctggggtcgggtcacacaatctaaactaactttggttggctaaacatttgattttttttagatagggtgggtatgtaaaagaaaggggaggccggg[175 bp omitted]gaggcaggagaatggcgtgaatccgggag[132 bp omitted]tagaaagttagtctttttttaaaataaggaaaggaatgtaagctgatgctgataacgcttggtattgaggcgtgtctaggcatttaacaaaggcaaaaaggaaaaagaaaaagaagggaaaggaggggtactatgaattaaagaataaatgattgatcagattattt[150 bp omitted]tttttagagtctcgctctgtcacacaggctggagtgcagtggcgtgatctcagctcaccgcaacctccacctcccgggttcaagctattctcctgcctcagcctcctgagtagctgggattacaggcgtgcgccaccacatccggctaattcttgtatatttagtagagacggggtttcaccatgttggtcaggctggtctcagactcctgaccttgtgatccacccacctcggcctcccaaagcgctgggattacagctgtgagccaccatgcctggcctattttttttttccttttttttttttagacacagtctccatctgtcacccaggctggtgtgcagtggcgcaatctcagctcactgcaagctccacctcctgggttcacgccattcttctgcctcagcctctcgagtagctgggacttcaggcgccc[186 bp omitted]aggctggagtgcagtaatgctgatcaaagcccactgcagtcttgacctcttgggttcaagtgatcctgccacctcagcctcccaagtagctgggaccacaggcacacaccacacctgggtaatttaaaatttttgtgtagagacaaggtctcactatgttgcccaggctggtctcaaactcctgggctcaagcgatccttccaccttggactctcaaagtgctgggattacaggcgtgagcccccgagcttggtcctggtcatttcttgactgcctgtcacttggggccacccagcccgccagtgtctgacttaggcttctggctgattctctgcggccactaagctcacaattggggaaccgactccatgattttgcaacatttcgatgccggaccctgacgcattactgtgagtcgggagggtcacgttccgtttgttttttgagacggtctggctgtcacccaggctggagtgaagtggcattggtgtgatctcagctcactgcaacctctgcctcctgggctcaagccatccttctgccgcagcctcccggcatgtagctgagactacaggcgccaccattcccagctatgttgtttttttttttttaaagaaagagacaaggtctcgctgtgttgcccagggcaatttcaaaattcctagactcaagcaatccctccgcctcggcctcccaaagtcctgggattacactgggattacaggtgtgagccagcacaccggctgtggg[136 bp omitted]ccccgtctctactaaaaatacaaaaaaatttgcggggcgtggtggtgggcgcctgtagtcccagctactcgggaggctgaggcaggagaatggc[136 bp omitted]agttctggataaagaacaatgtcaattaaaaaaggggtcccatcagtagaggctgaaatcatgactgaaactagcttaaagcccaaagcaaaacaaaaacccgaaagaaggccaggcatggtggctcgcactatcccagcattttgggaggctgaggcaggtagatcaccagaggtcaggagtttgagaccagcctggccaacatggtgtactaaaaaatacaaaaattagccagctggagcgcagtggcgcaatcatagctcacttcagccttgaccttctggactccagtgatcctcccacctcggcctcctgagtagctgtcccagctgtcccacttactcagtgcccctccggacccagcaattctttttttttttttttttgcagagatggcagcatgtctcaaactcctggcctcaggcaaacctcatgtgtcagcctcccaaagtgctggaattacaggcacgagccaccatgcctggcctagattcatttttttagatgcagagaatctgggctttggatttaatgacttaccaaataaaggctgtcttttttttttttaaaacaaatcagcaaaacaggggctcttggctagtttgcatgaggcatccagggatggagagatgtgtatttaagctaaaaaaagaaaaagtgaaactcacagcagtctgagtttttattcagaaaaggaaaaaagaaagcaactgagagcgaaatagtttcctggaatgctgtttttttttttttttttttttttttttttttttgagatggagtctcactctgtcgcccaggcaacagagtgcaatggtgcgatctcagctcatcgcaaccttcgtctcccgggttcaagtgattctcctgcctcagccttcccagcagctgggattaaaggcccctgccaccatgcctggctaatttttgtatttttagtggagatggggtttcgccatgttggccaggctggtctcgaacccctgacctcaggtgatccacccaccttggcctctcaaagtgctgggagtacaggcatgagccaccgcatccgaccttgaaatgcactttctttgaaacacgtcctcccctttctcaccataaactccctcacactctgcaggtttacctaactgtatgcatctaattatgtgattacctaaaagttccaggaacaggctgggcacggtggctcacgcctgtaatctcagcactttgggaggccgaggcgggcagatcacctgaagtcaggagtttgagaccagcctgaccaacatggagaaaccccatctctattaaaaatacaaaattagccaggtgtggtggcgtgtgcctgtaatcccagctactcgggaggctgaggcaggagaatcacttgaatctgggaggtggaggttgcggtgagctgagatcgtgctgctgcactccagcctcggtgacaagagcgagactgtctcgaaaaaaaagaaaaaagaaagaacgttttagagctaatctggagacaggccaagcacggagacccacctgcaaaatcccagagatttcctcaaggtggtctgcaacccggcccttattaggatgaggccagcctgcgcttttaagccaccaaaattcatgaacacacagagcttataatcagcacctcccctgcacacccaccattcccagttccccttttttagcccctcaccccagcctcaagtttgaaggggtttctggaggcctaaaccagctgcctccctgctgcgaactctgaaaggaagtcaccttcctttcactgcactttttcctccttactggtttgtcaagactctggcatcggagcctgagctggttacagccaggcactgtcaagctgttgggggaggggatgacaaattccctcccgttgagaaccacttggttaaacctgtccaactggaaggagtaacaaattgctcataaaatatgcatgttttggtgaaaccccttctctactaaaagtacaaaaactagccagaaatcgcttgaacccaggaggtggaggttgcagtgagcctagcactgcactccagcctgggtgacagactgaggctacgtctcaaaaaaaaaaaaaaaaatgtgcttgtttggcccaggagaggcaagaggtcttcttcacctacgttactggtgagaaaactcaaacctgagggcggcccacgccggagtgcagtaacaggcagaactggaacctggccccatcccggactcaggggacgggtgtcatataccccctctgcctcatccttcccactctgctaaccttccaaagatcccccgggttccgagttttccctggccgcttgatgggattcgaacctgcaaactcagcgctcgcccagcgcagcggccccgcctctcctcccctcccgccgcccggaggtcatgtgagcgcagtgccggagcggggcggggcgaggcggcggcgcgcagtgcctactagcaattgtagtccttgccccaccttggcctggcgaagatcccgcccctggaactacgctcccgtcgtgctccgcggctccaggcggagacgaggcggggtgaggtgggttgggccgggccggttgctaagacttggcgaagcgctgcgctcgcgcccggatccctcaggtaagcgcgcggccccgaggtctcgggttctccaggctcagacttccccagagggggagtaggggctgacatggggggtctcggcggtgaggggcgccggccgtttgtggggagaaaacggggggcccaggccagcctcgcgcgcgtctcgggcgggccggtgggcgacgcggggaggcggcgcgaatgcgcgtgcgcgcgcgcgcgcggcgctggcctgggggaagcctcaggaccgcgctcccccgggcctagcgcctttctgcgcgtgtgcgcccttatggtcggtgcgggagaccccgtatcctccagctgcttccggtggcccttcctcaggtcatgtcccgcagtcccctgcctctgaaccgcgctctcgcgagtttccgtagccttcgcgtccttcctccccagctctgattcgcctttatgtggagattcccctaggccttggtacatccccagaattgaccatcgttcctcatcgttacctagagtatgagtttttcaggtttttgtatcacaggcccccagttatctcccacacactaccccgaggaccgaggttccccgctgtcttgcagagaaggcctccttgtagggtggccagaaacagaggatcgactccgtggaaacaaggacggctgggtgcagttcctcaccctataaccccagcactttgggaggccaaggcgagtggatcacctgaggtccggagttcgagaccagcctgtctaacatggtgaaactccatctctgccaaaaatacaaaaattagctgggcgtggtgtcacgcgcctgtaaaaccagctactggggaggccaaggcaggagaatcgcttggacttgggaggtggaggttgcagtgagccaagatggcaccattgtactccaggctgagcaagctagcaagactcactctccaaaaaaaagaaaaaaagatttttttttaataagccaggcatggtgacacatgtctgtggtcccagctacttgggaggctgaggcaggaggattgcttgagccccggaggttgaggctgcagtgaactgtgatggcactactgcattccagcctgggcaacagagcgagaccctgtctctaaataaataaataaaatacatacgtgtagcgccggccgtggtggctcacgcctgtaatcctagcactttgggaggccaaggcgggtggatcacgagatcaggagatcaagaccatcctggctaacacggtgaaaccctgtctctactaaaaataaaaaaaagccaggcatggtggtggacgcctgtggtcccggctactcccaaaggaggctgaggcaggaaaatggtgtgaactcaggaggcagagcttgcagtgagccaggatcgtgccactgcactccagcctgggcgacagagtgagactccgtctcaaaaaaaaaaaaaaat[132 bp omitted]aatatggtgaaatcccacctctactaaaaatataaaaaattagccaggcatagtggtgcacatctgttgtcccagctgcttgggaggctaaggcaggagaattgcttgaaccagggaggcagaggttgcagtgagccaggatcgcgccactgccctccagcctgggggacagagtgagactgtcccaaaaaaaaaaaagcccccacgcagactattggtgtgccctggaactgagcattagctgttccctctccgagttctctcccctacttccccagccttccaggctgggctgtgggtcactgcctccgaggagccctcctggattctgctgaagatggtcaggcccctccatccccccattttctcttatgtacctgacagccctgccttaaaaaaaaaaaaaaggtagagcaggaattcccatttcacaggggtggaagccgaggcttggaggagtcaggactggtgcctgagttctcgcagtcaggaattgaccgcgctgggctgaacgcctctagggcaggttggggactgggtgtgttttctgggtggacatacccaggtcccggcgcggaccttggcctcctcatctgtgggcttagataaaggcctcccagcctcctgttcaccagggttgtcaccacgcagggtctgactcacctgcctggagctatgccggttcccagcccaggctggcggccgtgttctgctgggacctgggacctgggctgcctgccctcctgaggggtcccagtggtcggtcgcctgccttctgggtgggtgtggtagagggagggtcaggtggccccctgctgttggggggcagtcgctgtgggagtgagtcgtccccccgggccatagcaggtaggtaggaggtgctctggcagttgaggccgccctggcctgggacagtcaatcagcctgaacactgtgcctgttccgggattttgacctgccctccaagggcgcggcgggcccagcctgcagtgtcccggcagctgcctcctctctgggtcgtttgtttttcatcagacagaggttgtactcttggagggacaagcgaggctgtgtttgtcttttaccctggagacagtggagtgtttgtggcctagcagggccgtgcgggcctctcggtcctggtcgcgcgtggtgtgcgttttgggagggcccagcgagtcggctgctatgggccccacctggcacggggcctcgggcagcggcagcacctggcgctgcctccgcgcttcctgctcccggctcccactgcatctccggttctgtgctttgttgaacgcgtgagcttcgggcagcgctggggccgcttcagcgtgacctccaaggccactggcctggagttccactggctgctggtcccccatctgtggggcgccccggcggctgaggcgtggaccaggcagtgcatgtcgaggagtagcacccacagctgcgcggctgcgaaatgatccagagacacatccctgtctgcgggaggagccgtccataccagcggggatgtgtagtccaggctggcagttcaggatcacccggctggagtcattttaagatcatctgcggcttagccccagcaccatctgaggcagtactgtctgctagaaataactgtgagcacacaggtagtaaggtttttaggattttattattatttatttatttgaaaaaaggaacagggtctctctatcttgcccacgttggtctcaaactcctgtgcttaagtgatcctctcgccttggtctcctgagtagctgggactacatgtgcacaccaccgtgcccaactaatttatacttttaagcaatgtgggctgggcacggtggctcacacctgtaatcccagcactttgggaggctgaggcaggtggatcacctgaggtcaggagttccaagaccagcctggccaacatggtggaaccccgtctctactgaaaatacaaaaattagccgggcgtggtggcatgtgcctgtattcccagctactaggggggctgaggcaggagaatcgcttgaacctgggaagtggaggttgcagtgagctgagatcatgccactgcactccagcctgggcaacagagtgagactctgtctgaaaaaaaaaaaaatgtgggctgggcatggtggcttacgcctgtaatccaacctcaggcctgcggtgcgagtctgtgggggcagatgcaggtgggggaaggctggccagctgagactgtggtttgggggtgttcaggtggggtggatgccagagatgtgggagccagaggcgctgtcccccagggccctgtgagcagtccctgcaggctggctgtccccacgcctgcctctctgctgtgctgtctgcccgcctagggcaggctcccttctaatgggcggatcccgagagctgggggccccaccagcccttcctctccagtggagtggccctactgcctcatgtccacctgtgccagcagcagggatggtaatggctctactatctcctgtcctcacctgtgccagcagcagggatggtaacggctttactgcctcccgtcctcacctgtgccagtggctgggatgtcttcacctgtgccagcagcagggatgtcctcacctgtgccagcggcagggatggtaacagtgctggtgatgtcaggccgggaggttctcacccgagagccgccttggcacactgcccggcagtcagggatgttagcaggagccccgggagtgatcccagctcttcccgcagccccactccagccagggcctcctctgtgactgagtaagcagggacaccccagtggctgcctgctccacccgacagccagggcccaccacagctgcaggaatgtggtcaagggatgggaagtcgggcccaccaggggaggggctgcgctccggggcttacgtttcgtggcttgtcttctgaggtctctcttttcctagcccttggccgactagggggcgagtgtttacagaaaccactggaggtgggtgttccgtgtcagtgccaggctgtgtgctgttctgggagggggccccgtgtcccccacacttggcatgcttgctttctgtcactgcatagcagactccgtgcatctgtgggcttaatacaacacccgccagctcccggttctgtgggtcggggcctgaatgtgacatggctggctcctctctgcggggtctcaccgggctggaacccaggtgtcagccagggctgtgttgtcatctggaggctcaacgggggtggcatctgcttgcaactcacgcaggcgttggcggaattcagcagcttgcggccgggggaccaagggtcctgctcagttcctggccacatggcccttctgtctggaagccaggcgccgcctgtccccgcttctgcttccaggctctggcttctggagatgcagagatcacatcagtggttgcctgggttgctgtgtgtgttgtagggtggtgagacaagttttctcttaggggtgatggaatgttctggaattttatagtggtgatggttgcacaactccaagtgtc[141 bp omitted]cccaggttcaagcaattctcttgcctcagcttcctgagtagctgggattacaggtgcgtggcaccatgcccagctaatttttgtatttttagtagagatggggtttcaccatgttggtcaggctggtctcgatctcgtggcctcatgatctgcccgcctcagcctcccaaagtgctgggattacaggcttaagccaccacgcctggcttttttgttgttttttgacagtctcgcgctgttaccaggctggagtgcagtggcgcgatctcggctcaatgtaacctgcgcctcccaggttcaaccttctgggttctcctgcaagcctcagc[131 bp omitted]ggcctcccaaagtgctaggattacaggcgtgagccaccgtgcccgggttttcattttttttttgagatggcatcttgctctgtcagccaggctggggtacagtggcacgattgtagctcactgcagccttgaatttccggcctcaagtgctcctcctgtttcagcttctcgagtagctgaaaccaccggtgtgtgccaccacgcccagctaattttttgatatttagtagaaatggggtgttgttatgttgcctaggctggtcttaaactcctgggctcaagtgatccccccacctcggcctcccatagtgctgggattacaggcgtgagccgctggtacctagccatgaattgtgcttttgaaaatgacctgtcttggctgggcgcagtgactcacacctgtaatcccaccaccaggttgaagcgggtggatcacgtgaggttaggagttcgagaccagcctgaacgacgtggtgaaatcccatctctactaaaaatacacaaaaattagtcgggcgtggtggcgcatgcctgtaatcccagttactctggaggctgaggcatgagaatagcttgaacccgggaggcggaggttgcagtgagctgagatcatgccactgtactccagcctgggcgacagcgagactccgtctcagaagtaaaaaaataaaataaaaaaaaaagaaaatgatctgtcttctggtaggtgaattatatcttcgtttttaaaaaccaatggctgtttaaactctgtgcacaccaggggttagcaggacatgagggagtgtagctctgatgcggtgacctgggccggagccctcggactagcctcagctttggtggcagcacgccctgccttgtggagccacggcctcccgggacggactccccggctctcccccagccgcccgcagccgccggatgatcctctgctcccgtctctgtctcccacagtcggcctcgctgaggatggagcccgccccgggcctcgtggagcagcccaagtgcttggaggccgggagcccggagcctgagccggcgccgtggcaggccctccctgtcctgtccgagaagcagtcaggggacgtggagctggtgctggcctacgccgcgcccgtcctggacaagcgccagacctcacgcctcctgaaggaggtgtcggccctgcacccgctccccgcccagcctcacctcaagcgggtgcggcccagccgcgatgccggcagcccccacgccctggagatgctgctttgcctggctgggccggcctcgggcccgcgctcgctggctgagctcctgccacggccggctgtggacccccgcggcctggggcaacccttcctggtgcccgtgcccgcccggccgcctctgaccaggggccagttcgaggaggcccgggcccactggcccacgtccttccacgaggacaagcaggtgaccagcgccctggctgggcggctcttctccacgcaggagcgcgccgccatgcagagccacatggagcgggcggtgtgggcggcccggcgggcagcagcgcggggcttgcgggccgtgggggccgtggtagtggacccggcctcggaccgcgtgctggccaccggccacgactgcagctgcgcggacaaccccctcctgcacgccgtcatggtgtgcgtggacctcgtggcgcgcggccagggccgcggcacctacgacttcagacccttccccgcctgctccttcgccccggccgctgccccccaggccgtccgcgcaggcgccgtgcgtaaactggacgcagacgaggacggcctcccctacctgtgcactggctacgacctgtacgtgacccgcgagccctgcgccatgtgcgccatggccctggtgcacgcacgcatcctgcgcgtcttctacggtgcgccctcgcccgacggcgccctgggcacccgcttccgcatccacgcacggcccgacctcaaccaccgcttccaggtgttccgcggggtgctggaggagcagtgccgctggctggaccccgacacgtaggcgccgccctcctgcctccggacccttcccgctcccggccgtggggcgcccctcctggacttccgggcctcgatttcttccgcacaagcctgaccgtggatttcagggacacataccgcctccagcggggagcacgggtgctgccttccgtgcggatcgagctttcctggactcggtcattggggccaccccgtgccagcggtgcccttctgcggccgcccttgctgcgtttgtgtcccctctgtctcgcgggccgggaaactgctctgatgggaaaataaacagcccaaaaccaagtgggtgtctgttaggaggtgtgtgcctttgtggccagggtcccgagtggggtggggtctgtacagggcctggtggctcagccggaggggacctgctgagccacgtgtggtcagagacctgggctgattctggggtagagcaaggcccccagctgctgcctcctttcccgcttctggagtcctgatggttccaggcgtgcctggcccaagtgtgtggacactaggcgtagtccacagggcaccgaccctaaggaagggccctgggatttcgtgtccttcacaagtggcaacaggggaccccaaagggctgatgctagtcggtcacagcacagtgaggactagagccgtttttgcagaacttggagcaggacctgtgggtccacccggcaagtgtccattgcctgaccatgtgggtgcagctttgcctccagacacgcctgctgtgagcccccagcccataggggaggggatccggcaggtgggggctctgcgtggggagctcatgcagtggacagaacaccactgctggccaggagcccgccaggcctgcagtgggggagtccgtgcctgggggtgggactgaggtgggctggagggtcccggatggggccagagccacagcgtggagtgaggaggtgggagccgcagaggcgtgcccagttgagtggtagaggcagcatttgggcctccttcatgctcaggtgctcagctccttcccctgaggggcaggaagtcagggaggagggagtgagaggtgggaggtggcaggcgggcggaggggaagatgtcctgtcccaagagccaggggtgccccaccccacggtgacatgttcctgaacgggttgtgagtggagggctcagttcctgggaactgcctcacctggactgtgggcgggaggcagctcctggccccgtgcccgccccctcgggcctgttcccctgccaggatctgggatggttcacaccccactggtctgtgatgcccagtgggcagcaggcatgcccctgctgggctggcccacctcccgatggcaggtccgcccccaggatcacggaagcagctagatccactcagtcgtgggtggatgtcaggccaggtggggctgctctggtgggtgagctcatggggttccctttcagaacggccagggtgccatgcggatgcgatggggtcttaggccctgcagcgttcaccttgtggcgcccaccccttgtgggctgaagccgggatttgggggacgcaggggcctaggacagcggggaaggggcatcctggctggggcggtgggtgggaggggctgcggccagccctgcccgttttgccagcatgggtggtgtgcactggagccgaggggagggggacctgtggggtaacacattgggtcgagtcaggcctgtggctcccgcttagcccactgctgtttccagagcacagggcacgatgaagggcttttcagccacggtgggtgggtggttagcgctctgcccagggcagctcagggttccctgactgtggttgtcttccttccaggcggctgcaggcttcagcctgcgctggttggtgaaacagagatgtcaggtgagtcctgcctgcctgggagcctccagcagcgtgggcgggagggagatgccagcagttcccacaggagccctcggtcctggccgttggcaaacagtgtcctcctggcccacctggcctctgactcctcgggtcccgtagcccagcacagctggagtcacgcctctgctgggggcaaaggacagcagagccgcctgtgtatccgctcggacgcctcactgacccgaagcacagcccagccgggtgcccctgccatcacagctgctctttccttatagcagcgggcgtgttctcatgtgccccggggtccctcacccactcatttactggcagccttccccagtggggcgtaagcccctgaggacagggcctcttgctgtctgactccccatctggccctcgcaggcgcccagggacacttcctcaggcagtgctggctgagcagaagctcctggggggctcccagtgccacgctgagtgccccaaaggctgtgttcccatcttgatccctggaacctgtgagtgggacctcatttgggaatatggccttaactccggacgtgatggagttaagataaagtactggagcagggcgag[223 bp omitted]gaggcaggagaatggtgtgaacccgggaggcggagcttgcagtgagcgagatcgggccactgcactccagcctgggtgacagagcgagactgtctcagaaaaaaaaaaaagagatggtccgggcgtggtggctcacgcctgtaatcccagcacttttgggaggccgaggtgggcagatgatgaggtcaggagtttgagaccagcctggacagcatagtgaaaccccatccctactaaaaatattagctgggcatggtggcacagcacctgtagtcccagctacttgggaggctgaggcaggagaatcgcttgaacctgggaggcggagttgtggtgagccgagatcacgccactgcactccagcctgggtgacagagtgagactggatctcaaaaaaaaaaaaaagacatggagatacaggaggagtcgtcgtggagatggaggcagaggccagagctatgcggccatgagccaagggcgctgggatcccccagaagctgcttgagagaggcaggaaggctccttccccggagcctgcagagggagcgcgttcctgagacaccttgatctcagatttctggcctccaggactgttagcagataaatatttgttgtgttctttgttttgttttgagacagggtctgggtctctcccaggctggagtgcagtggtgtgatcatagctcactgcagctttaacttcctgggttcaagcgatcctcctgcctcagcctcccgagaagctgggaccacaggcacgcaccaccacgcttggctaatttttgtagtttttgtagagttggggtctcgctaggttgccaggctgatctggaactcctgggctccagcagccctcctgcctcagcctccaaaagtgctgagatcacaggtgggagcccccacacctgggcagtttctgttgttctaagcctcccagtcggtggtggtttctcacagcagccatggggaacggaagcgtccccaggccacagcctccccgcagtgtgcggactcggcctgctgagcctgcatgttggcgtccctgcctgccggagggaatgatactaaatgcagcctgctgcagccgcacccacactaaacatggaggagggctacgaagagtagcagggccctgcatgaagggtgacacgtaaatttaaaaaacaatttcggccgggcgcggtggctcacgcctgttatcccagcactttgggaggcagaggtgggcggattatttgaggtcaggagttcaaaaccagcctggccaacatggtgaaacctcgtgtctactaaaaagaaaaatccaaaaattagccgggtgtggtggtgggcgcctgtaatcccagctacttgggaggctgaggcagaagaatcacttgagcttgggaggcagaggctgcagtgagccgagatcgcaccactgccctctagcctgggagacagcgcgagactccgtctcaaaaaaagagtcataaacttagttccttaaaacagtgaaatcagttatctgacagttctggagaccagaaacgctaacatcaagctgtaggccggttcccgccttgcccagcgtctagaggcgcccccatccctccactcagggcccctttctcccccttcacagcctcagcgcagcctcttcccgtttctctctgactcccaccctcccgtctcctctcgtgaggctgccacgaggaccctctcctgtctcagcgtcctgccctcaatcccaactgcagagtcccttctgccatgagaggcaacccagccttgggtcgaagggatgaggtggggcctccttcaagagacaaagtctggttctgtccgtgggttctctgtccctacagaaaaggagaacaacttcccgccactgcccaagttcatccctgtgaagccctgcttctaccagaacttctccgacgagatcccagtggagcaccaggtcctggtgaagaggatctaccggctgtggatgtgtgagtgcgcctgggggcaggaggcgggaagcgggaggcagggctccccgagggagggagtggcattcaggcaggggcagcccgtcgggggcccaccgtctactgaagccgtcctgggcctggtggtccctgcggtgaacgaggctggtgtccaggccccagtgtcttggcttgcacagttcatcctcgacatggggtcactgggctggggaggcggacagcgggtgccccattgctgggcccatgctttcccacggccacaccctcccgtgcctgctcatccgtcctccctctctcttcgcagtttactgcgccaccctcggcgtcaacctcattgcctgcctggcctggtggatcggcggaggctcggggaccaacttcggcctggccttcgtgtggctgctcctgttcacgccttgcggctacgtgtgctggttccggcctgtctacaaggccttccggtgagcagagctgccgggggccgtctgcacccagagggaaccagggcccactctgcaccccagtcccagcccagctgtgaggagctgtccctttctctgcccagtgtgaaagacagttcacatctgggggtggcaaactgtggcccacaagccagagccaactactgtctgttttgttttgctttctagtaattttggctgggtgcagtggctcaggcctataatcccagcactttgggaggccgaggcaggcggatcacctgaggtcaggagttcaagaccagcctggccaacatggtgaaacgctgtctctactataggtacaaaaattagccaggcgtggttgcgggcgcctataatcccagctactcaggaggctgaggcaagagaatcgcttgaacccgggaggcagaggttgcagtgagccgagatctcgacactgctctccagcctgggcgacagagtgagactccatctcaaaaaaaaaaaaaaaggaataaaatagagcctccgctctcaccatctctgactggcccgttcctctctaggcgcgtctgggagaagccagggctgtggtaaccgtcgtgttttctgtccctccccagagccgacagctcctttaatttcatggcgtttttcttcatcttcggagcccagtttgtcctgaccgtcatccaggcgattggcttctccggctggggcgcgtggtaagcctctctctgatgggcgtggtggctgtgatgtggctcagctgccaggttgtgggcctgctgggaagccaggcggccaccggagcgtgctggtccgggattgtacgcgctctcctagggaggggtctgagctcaccctggcagcgcccgcgtcctcgccagcgcccgcgtcctcgccagcacccagccatggttcgcgattgtaggcactctcctagggaggggtccgagctcgccctggcagtgcctgcgtcctcgccagcgcccagccaggcttgtctcctgagtgttgatcacacccctgacccggggtctgggagccagttcctggctgctgatgtttctgcacggatcgctgcaggaggaagacctgtacatctgtaaaaacacacatacctggtgctgttaccacacctgagaaactcacagtcactctctaaggctgccaggt[132 bp omitted]acctccacatcctgggttcaagcaattctcctgcctcagcctcccgagtagctgggactacaggcgcccgccaccacgcctggctaatttcttttgtattttagtagagacggggtttcaccgtgttgcccaggctggtatcgaactcccgagctcaggcaatccgcctttctcagcctcccaaagtgctaggattacaggtgtgagccactgcacccggccctttttttaaactattattatttttttttgagatggagtcgctctctgtcactcaggctggggtgcagtgacatgatcttggctcactgcaaccttcacctcccaggttcaagcgattctcctgcctcagcctcccgagtagctgggactacaggtgtgtgcccccacacccagcaaatttttgtatttttag[158 bp omitted]aatttgtaattctcagttgcagagagtgactgttctcgcccacgtccccgacgtgtctcccttgtccttggcacggcgggagctccccacgggtgacgctgctcacggagccgtgggtgcctttggtttcctgggctcccattagcaagctcctgttctggggttcctgccccacaagactgcggtactctcacgccagtgcacagatcagaatccagataaggtcccaggtttcctgggatggtgactcctctcccttcagggcccctcgatctgcaggcctctcccctcctgcacctgcgcctggcgccaggccctccagggtggctgggatctgtggtttgtgcacccctcggatgtgccgctgaagctggtctgtcacctgccaccccaagagcctgagtgacgttgccccagggatctgagttagagtcatagtgagcgtgtgcctgggactcccagctctgccagcctttggggtgcttccccctcctgcagaggctgtggctgcaggtcaaggcactgctcgtcatcctccgagtcctcctgagctcccagctgccagctcggctcccactggcccttccctgggctccagtgcctcctgtgagccgcctccccggtgcgtccccagctctcccaggctgagctgggtggacaggcctgtgcccgtgttgggtggtcctgagatcccggcatgaggtgagtgcccacatgtgaccctcagagacctccctgccccctcggccctcgtgcacgtgcggcagcagcgacttggctcttctcattggagcctgggtcatctcccgcaggtcacgggagaagctgagcatgcggtccctgcccgaggtggacagaaggtgaacgctcttgagaaagaaacccagcgggtcttaggagagcccggccccccttgtaatgagagaaatcaaaccacagcgcacagcgacttcatgtccaccgttggcttagtgaggccccacgctcagtgcgctgctgtggggcgagaggggacagccccgctctccctgtcctgggcggcttcaccagcgccacctccccacacactctgtgcactgctgtggggcaagaggcgacagccccgctctccctgccccgggcagcttcaccagcgtcacctccccaggggtgacgcatgcccgaggccatgagccacggcagcatctgtggtggcagaggactggaaactccagagaaatgacccccagcggggcctagctgtgtagatggtgagggtggccacatggcggcagccaggtactgaggacacggtgcagcaggggcccccggtgggccccgccaggaatcggacatcagcgggcgccgcagcctctaagcggagcatgcagcccactgacagtgtgctgggtgcctccctagacctgacacttgcatgcgggggcgtgcgatgctggccagtgggaagctgcgggggcggcggcaggagtcctcaaatgcctttgccgcttttcataaatctaaaattacatccaaacagaggtttacttttttaaaaaataaaagaggccaggcatggtggctgacgcctgtaatcccagcgctttgggaggccaaagcaggagaatcactgcttgaggccaggagttcagactggcctgggcaacatagggagaaaccatctctccagaaaaaaaaaaagaggaaggaatgacccaaagaccatgcagcctgtgatgctgtggaggctccaagcaggcgaacacaggacaggccagcatcttgcagggacgcggcggggggtaccgcgtgtgcgtgcatatcacgccccgtgcatgtgtgtgcataagctccccggacacatccgggggtgtgggtcctgcgggctgcctgtgcaccagggaggggagtcagcaggagagagactgtacgtcgtgcctgcctttaagttccctgaattttaaaccctgtggtttcatcacctgttaagacaaaaatctcaaaatgactgttttctgcctcctgggtctcaaaggcaggtgcaatgcccagaggctggtcctgcacagagggacccagggcgtgctggccttcccagtgtcccactggtggctgatctaagcagtgctttccctcgtttttttattttgagacagaatcttgctctgtcccccaggctggagagcaacggcacgatctcggctcactgcagcctcccgcttc[133 bp omitted]tcggcctcccaaagtgctgggacgacaggcgtaagcctctgcgcccggcctcctcattgtttctaatggtccctcagtgcccaccgggtgatggtggcagattttccatccgcattgctcccggacatgcggatgtaggtttcagcagttcccatcattagacacagttgccgtaggctgggttcttagtagcaggctcagtggggcctttgagtctttccatggctggtgcccgccggactcactgagggaaactaatggggaagcactggtctccattccctgcacgcacagcccactgctgcgatggtgaagggataaggttgtgttcacgcgtcgaagtttgtgtccactgcacacgcggctcactgctgcgatggtggagggataaggtcgtattcacgcgttgaagttggtgcctctcagtatcgctttatgtttgttggccacttggtcgtccttgtatgagctgtccactccttgttgattggccagagctctttacatggggaggaccatgggccggaccatgggccctcatccagcaggtgtgcaggcacccacgcactctcttgtcccttgcagcggctggctgtcggcaattggattcttccagtacagcccgggcgctgccgtggtcatgctgcttccagccatcatgttctccgtgtcggctgccatgatggccatcgcgatcatgaaggtgagtcctcggctttgtgacgtccagcccttaccccttctccatgaacctcgtcacccaactgtcccaggtgggtgaacgtcgaggagccgggccctctccccacggtgtcacgcaggccgcacttcatccccagcagtgagctgggatgacagcaggaggcactgtcaccagggacactcccagggacccagcgcctgggttcctatggggccagtcctgtggccccctgggccgggagtccagactccagagggaagcaggggttgtgtgtaaaccgcagtgtttgcaggaacagctgaggccctggagctgtcctgtcagtgagggtggggccccttgcaggttcccggtcacagtttccatctgaagatagcggaagtgttgagctgggctcataacagaaactttcagttacagcaaaatgcttttttttttttttttttttttagacagagtctcgctctgtcacccaggctggagtgtagtggtgcgatctctgctcactgcaagctccgcctctggggttcatgccattctcctgcctcagcctcccgagtagctgggactacaggcgcccgctaccgcacctggctaattattttgtttttgtatttttggtagagacaggttttcaccgtgttagccaggatggtctcaatctcctgacctcgtgatcctcccgcctcggcctcccgaagtgctgggatgacaggcgtgagccaccgtgcccggcctattttttatattgtagtagagacagggtttcaccatgttgtttggactggtctcgaactccagagctcagacagtctgtctgcctcggcctcccgaagtgctgggatgacaggcgtgagtccccgtgcccggccgccatgctcattttctgtcttctgcctccctgtcctctgtccttgcaggtgcacaggatctaccgaggggctggcggaagcttccagaaggcacagacggagtggaacacgggcacttggcggaacccaccgtcgagggaggcccagtacaacaacttctcaggcaacagcctgcccgagtaccccactgtgcccagctacccgggcagtggccagtggccttagagggagcctgccctgcccccaccgcccaccacctcctccccttcattcctgctgctacccctggtcccgagggctgggagtacctggggccccatccccccagctgggatggtggaagccggtggtggccacggaccgcccccctcctgccagggccacagaacccgtgttcatctcatccgagagcggagttcctcacaagcactccccagcagcccttggcctctgccgtccacaggacgccctcttgctcccggaaacgtgtggtcacccgccgtccactgcacggctggtacggccttgtcttcaggtctcgaggcctgactccgggggacaggtggcagcaggtcggccgccctcccgtcctcccagagctgctggcgctgaggtcagagcgggtctgatggggagctccgtctcaccggccacccgccgtcaccatggcagatgcccttggccggaactaataagaggcgtcggggccagcttccggtcccctgcagtgatagagggcttggtgcctagctgagtcctcgctgtccccgccatcccctgatctgtgcggctccagcctcgccccctccccacgtgcaccatacctggggagttcctggtccagggtatcctggggccaccctccctgcctccaaaacagggatccctggcaggctgtctttccacgcccctgagttcagagtcggggacccaggccaggtcgggagcacagccgctccccaaacccagcaaaccggcagagagccggtttcccagcagccggagccctgcaggagaggcctttgtgttttgttttgttttgttttttctcttttgagacaagagtttcactctgtcgcccaggctggagtgcagtggtgtgatctcggctcactgcaacctctgcctcccgtgttcaagcagttctcctgcctcagcctcccaaatagctgggattacagttgcctgccaccacgcccagctaatttttatatttttagtacagatggggtttcaccatgttggccaggctggtctcgaactcctgacctcaagtgatccacccgccttggcctcccaaagtgctgggataataggtgtcagccaccgcgcccagcctggagtggccttttatgagaggggacccgtcaaatctgtgccttatggaggggtccggcagcggccacaattgtcttgtcccctcaccccccaactccccctggaacacctctcccaggcaagacattttcacagcaccattcacaacggttgggccaaaaagaaacttttccttcatcatttcctgcactcgctgaccacaactttggacaccccaggctgccacccctccccacccgttcacccccaggatgctgttgctgtaggacgcctgctgccctggagccctccccaggatgtgagccagtcccctcgctggtacggaatgccgctgggtgcccggaggcggccatggtgtctcgatggacggcagccaggatggagcacccatgggtctcacggccatgcttcagggtcttcaggtcctgcccccggccagtctgccaagaggcacccccttccccagcctctcgcctgcactgatgcagacaaaatctcacctggcaggcccaacccccccccacccctcccccgccgtgtgtggcccctcgccgcatcgttggggttttgttatgtgaaaatatcctggaaataaatacatgtttctgcacttagagccagggacctgccgcgtttgtgctgtgagcatgtgtggttcccccaggccgtcttctcccttgggagacccctcagcatatggcctctggcaggatgcccccctgcagcgcctcctcccacccaggccccgggtgccctgtagccaggtgtgcccagggctgaccctgccatcctggccaacgtggtgaaacccggcctctactaaaaatacaaaaattagccgggcgcggtggcgggtgcctgtagttctagctactcaggaggctgaggcaggagaattgcttgaacccgggaggcggaggttgccgtgaacccagatcgcgccactgcactccccaccggctcaaaaaaaaaggaaacttgcacagatggaaagccagtgtcactggccctacgtaaaaagcaaacatcggccagacgcagtggctcacgcctgtaatcccagcacgttgggaggccgaggtgggcggatcatctgaggtcaggggttcaagaccagtctggccaacatagtgaaactctgtctctactgaaaacacaaaaaattagctgggcgtggtggcacacgcctgtaatcccagctactcgggaggctgaggcaggagaatcgcttgaacctgggaggcagaggttgcactaagccaagattgcaccattgcactccagcctgggtgacagagtgagactctggagagaaaaaaaggggggttgtggggtgtggtggctcacacctgtaataccagcactttgggaggccgaggcaggcagatcacccaaggtcaggagttcaaaaccagcctggcccacatggtgaaaccctgtctctactagaaatacaaaaattagccaggtgtggtggcaggtgcctgtaatcccagctacttgggaggctgaggcagaagaatcagttgaacctgggaggcagaggttgctgtgagccaagataacgccactgcactgcc[148 bp omitted]cccatctccactaaaaatacaaaaaattctccgggcatgctggcgggcgcctgtattcccagctactcgggaggctgaggcaggagaatggcatcaac[143 bp omitted]aatactttgttttttgagaccgagtctcactccgtcgcccacactggagtgcaatggcgcgatctccgctcactgcaagctccgcctcccgggttcacgccattcccctgcctcagcctcccgagtagctgggactacaggcgcccgccac[174 bp omitted]gtggcatacttttttaaatgtgtgcaaaactcttgaacatctggcttcatagaggacaagagggatggctcagcagctctgtcgcaaaagggtgttttaccacaacaaagattgagggcaaatggtctatctaggatgtgagcccaggaagtaccgaaggggtgtggggatggggagtggcccatagggaggcatgaacagggaggttacagctccaggctgctggagctcagtccctctgaggatctggctcaggttgtcgtccggaggtgagggagctggggtatttatcctccaactcccctgcaaatggtatgggggctggggaggcttagctccgccctcaggtagagagtcatagatgctggtctgtgtgtgttgtgcttgtgttgcgtgtgtatcgtatgtgtgtgtgtgtatgtgcatctgtgtgtctatgagtgtctgtgctttattacagattgaattaggtcctccccaatacccatatgttcacaccctaagccccaggacctcagaatgtgactttgcttggaaataaggtcattgaggatgaaattatatagttaagatgacttcattctggagtagggtgggcactgatccagtgtgactggtgtcctttacataaaacaggaaatttgagctgggcccagtggctctcacctgtaatcccagcaatttgggaggcagaggcaggaggattgcttgagcccaggagttcaagaccagccttggcaacatagtgagaccctatatctacaaaaaaaattaaaattagccaggtatggtggcatgcgcctgtagtcccagctactcaggaggccgaggtgggaggattgcttgagaccaagagtttgaaaccagtctgggcaacatagcaagatctcatttccacaaaaaatacaaaaagtgtcagggcatggtggcacatgcgtgcattcccagctactcaggaggctgaggtgggaggattgcttgagtccaggagattgaggctgcagtgagctgttaacggcgccactgcactccagcctgggtgccagagagagaccctatctcaaaaaaaaaaaaaaaaaaaaaaagccaggtgcagtggctcacgtctgtaatcccggcactttggcacaccgaggcgggtggattatctgaggtcaggagttcaagaccagcctggccaacatggtgaaactccgtctctactaaaaatacaaaaaattagccaggcgtggtgatgcacacctgtaatcccagctacttgggaggctgaggtgggagaatcgcttgaaccgggaggtgtaggttgcagtgagccaagatcacaccactgcacttcagcctgggtgacagagcaagacaaaaaaaaaagggaaatttgggacacagacacacacaggacgaacaccatggtgaagctttcgcaagccaagaacgccggtcaccgccaagagaggcctgggacagagtccactcgggctcagaaggatccagcgtcgctcacaccttcgtctgggactcgcagccccagaaccgagagagaataaacaggtgtttgcgccgccgggtctgcggtacctgtcaaggcagccctagcaaaccgatgcgtgtttgcatgtgtgaatgcgtgtgtgcgtttacatgttcaggagtgacaggtgctgcagggtactgacggggaccgcagcctctgctgtgcgtcctaaatatcacgcccctctttctgcaaactgtcgccccagtcactgccccgtcttcccttcggaggtcgaccccgccgccctccgctcggccgccagagggcgacctcggactccagtcggacgggctctgccctggctcccgggcttcaggttctaatagaaactctcgcaggggtgggtcacgcctgtaatctcagccctttgggaggctgaggcaggagaatctgccgggaggcagaggttgcagtgagctgagagcgcaccattgcactccagcctgggcgacaagagtgaaactccttctcaaaaaaaaaaaaaaaaaaagaaaagaaaagaaaaaaaatggggagtgtccgcctctggacaaggtgcagccggcatgatgtggctcctgagtggccacgtccccttcagggtcacaggggcgatccagggaatgaggaaaggaagacggaactgcaggcatggcgggggacctggcgggcagctgggggcatcgtgtgcccccccccatggctactgcccctggtggtgagtccccggggtgggcatcactaaaagagtgactgtgatggcttcattgggctgggccctccaggctccccctccacccctgccactgagctccacgcccggacccaggcctgggggcactgcagggacggatcctcaaccctctggcttcagcttccatcccagcggggtccagctggggacttgcaccagggggcagggggctgggagagtgagggaggaagagtgagggaggggaagtgaggccgattgtcggtccctggcctcctccctctagaggacagcctgtccatgggggtccctctctgcagcccatcccccacctgtaaggcgcccactgttgccaaccccaggggctgtgtcattccgcgttgctgcccctcaccctgcctacgcctccacaaaccccactgctaaatccttcttccacatgagggagccatcgccttccaacagcaatttaggagggtgaatgtgatgtttgggatgtctcacgatttcccagcatgaacgcacaatctcaagctgtgtgtgtgtgtgtgtgtgtgtgtgtgtgtgtgagagagagagagagagagacagacagagagactcactctgtcgcccacactggagtgcagtggcacaatctcggctcactgcaacctccacctcccaggttcaagcgatcctcttgcctcagcctcccaagtagctgggattacaggtgcacgccaccaaccacacccagctaatttttatatttttagtagaaactagtttttgccatgttggccaggttggtatcgaactcctggcttcaagtgatccacccgcctcagcctcccaaagtgctgggactacaggcgtgagccacccagttgagtcatttttttcttttctttttttttttttgagacggagttttgttcttgttgcccaggctggagtgcagtggcgtgatctcggctcactacaaccaccacctcctgggttcaagcaattctcctgcctcagcctccagagtagctgggactacaggcatgtgccaccatgcccagctaacttttgtatttttagcagagacagggtttctgtttctccttgctggtcaggctggtctcaaactcccaacctcaggtgattcacccgcctcagcctcccaaagtgctgggattacaggcatgagccaccatgcctggccccccagttgagtcatttccagtcttctgagccccagaaacttgataagatgtctgttgttttatttattaattttatttttgttttatttatttatttatttatttatttatttgagatggagtcttgctctttgcccaggctggagtgtagtggtgcgatctcggttcactgcaacctctgcttcccaggttcaagagatttccctgcctcagccgcccaagtagccaggactacaggcgcccgccaccacacccagctaatttttgtgtatttttagtagagattgggtttcaccatattggccaagctggtctcaaacccctgacctcaggtgatctgcctgcctcagcctcccaaagtgctgggattacaggcatgagccatggctcccagcctcttcttttttattaaaaaaaataataatttgtttttgcttaatttatttcaccagtcatatcacaaagacatgtgttgttttaggccactgagtttggtataatttgttatgcagcagtagctgactgatacaataggtgttcctggattatcttcagaaacctgataataatatgtacactaactagggctgtatcagggtgcatggcagggtttttgaaggcattttaaagaggtttagttcctgtcctcaggagctgctgcctagtggggcagacagaccatgaatatccatcatggaaggcagaacacataagtacatggacgaaagcagttccagaggctggtgggttggattcatttggcctgatgtatcatggagtcctcccaaaagaggtgatcatctgcctgagctttgccagacctgttgggctgagagaagccagacaaggctcagatgggtggagggtcagggtgggttggaaaggaacaagtcagtatgggtgcagagggcgtcctgatggatagatggggctgcgaagtggaaccagccattgaggcagcctcgaatgctgtccccattgtggggactttgaaaagccaccctcctttgaaacacagaaggggcaaggagtaaatttatatttctttttttctttttttttgttttgagacggagtctcactctgtcacccaggctggagtgcagcggcaccatcttggctcactgcaagctctgcctcctgggttcacgccattctcctgcctc[135 bp omitted]gcctcccaaagtgctgagattacaggcatgagccaccgcgcccggccaatttatatttctggtaaggggtgggaagaaggagctttctcaggctggaggggagagaagacagatgagcacagacactcctggcagcggcatgagggccggggagcaggtgcagggcacagcggggctctgcagggcggttgtagttggtgaggaccactggagcagggccttgaagggcgtcacccctcacctggctgcctctgggccatcctccagtctgccagggactagcagaggggagaaagtgggagaggaatcattatttgatgacctcattcagccctagggatttggggtggctaaggtagaatggcagtggattatatctgacatgatgcggggtgtccgggctcagctgggcagttctgctccctgtggtgatggggggtaatcagcaatcatttagtggctttccctggccgggaatgtttgaggtagctcactcacagggctggcaggtggtgcctgctcagtggtgccatcacccaggggcttccaggtggctgcctcacaagatggcagctgggttccaagcagaaaggacgctgttgagttcttttttttttttttttttttttgagacacagtctcactctgtcacccaggctggagtgtaatggcgcagtctcggctcactgcaacctccacctcccaggttcaagtgattctactgcctcagcttcccgagtagctgggattacaggtgcccaccaccacgcccagctaattttgtatttttagtagagacagggtttcaccgtgctggctaggctggtctcaaactcctgacctcgggtgatctgcccgcctcggcctccccaagtgctgggatgacaggtgtaagcaccatgcccagcctactgtcgagctcgtaagaccctccctcagaagtctcaaggcaccacttcccctgccttctgttgctaaaacaggtcacaggagcagctacattcaggggaggggaaatgaactgtgtctttccgtgggaggagcagcaaagaatctgtgaccatcacacccagcttttgaaccacttcttctttgtgtctcagtgtttgtggcatgcagcatccctgttgcctgggtccaggatgccaccctcctactggggttgcagcaccaaggggctgggcattccatcgagctgaggggtgggggctctggatgggaggctccctggggggagctcacatcttccatgaagcatcatggtcattgttgccctgtcctgcaccctgtccactgcaggctgccctctgtggctggccttggtgacaagagatgtgggagagaccctggtcaccaccatgggaggagtccccaggcaccaggggcaaatgaacagagtgaatgccaggaggaccatttaggtgcaatatgaccaaaaataagttaagtccaagtgggctgcatcatcaacaagaacatcccccagcctccatgaaacagcccaaaacctggagcaagacggttccctgacgctgagcgatgccattcacagcagcgttcctgaataccccccatgcaggcactcacatgctcacacacacaatacacaaaccaacacacaccacacacaggcatgccaaacacaggcacacaaatgcacacccccccatagacccaccgacgaacacacacacacacacccagatgcacaggtgcgcacacacacccacgcacacaaagacccagagacagacatgtgcacacacatacatatgcacacatgtacgcagatacatatgacacaaatgcatgaacacatggaccacacataccaacatgccacctcacacagacacacctaacacacacacacccgtgcacacatgtacatggacatacacactggaaaacaacaaacacatatacaaaatgcaggccggttgcggtggctcatgcctgtaatcccaacactttgggaggccgaggcagggggatcacttgagcctgggaagtgagggctgcagtgagctatgattgaatctctgcactccagcctgggtgacagagggagaccctgtctcagaaaaacaaaacacgaaacacaaaatatgaccgggcgcagtggctcgcgcttgtaatcccagcactttgcaaggccgaggtgggtggatcacaaggtcaggagatctagaccatcctggctaacacggtgaaaccccgtttctactaaaaataccaaaaattagctgggcgtggtggtgggcgccggtagtcccaggt[139 bp omitted]cacacacaccaacatgttacatcatagacagacacacaaaacacacaaacatacacccatccatggacatacacacagacacacacaaacatcaacacacagcatcccacacagacacacaaacacacagccatgtaccctcaaaggacgctgcaggatgagccttcattctctgggacagcagagaaagtagacaaaggagagaaacttctctcagagtcacccatcctctgactggatcccgtgcccctgtgaagaggcagatcccagtgccccacacttggctctggggccacccactgccgccaggctctgtccctgcggttggtgggggtgagggcagaccctgctctgtgctgcttcctcacccaccaaaacttcctgacgtcgccctgttccgttggctgcgctgcatatgggaatgcagtgctgggcaggcccagcctcccagctgggaaggggtgtcgccactggctgcaaagacaggtcttcttttcccccaagtctgtgtttatgccctactagagactgttgggtgtaattcccagaaagttctggaatgatctaaaatgaggaaatagaaaaaagttgtagaatcgggccaggcgcagtggctcatgcctgtaaacccagcactttgggaggctgaggcaggtggatcacctgaggtcatgagttggagaccaacctggccaacatggcaacatgggcagacatcaccaattaatcatcgaatgatgtttctcctgacctccttcctcctgtgtacagggtaggcatcaccaatcaagcaatgatgttggttgactggggaacgctgctgtttgtcctgccttccttcctcttgtgcacagggcagacatcaccaatcaaccaatgatgcccacactgcttccctcccatgcacaaagcagacatcaccaatcaatcgagcagcaccaggaggaaaccaatttggcagttcaatccgtcttcaactctatccttttatagataaggttgaggcccagggacctggtcaagggcaactacagggcagatccctcctcctcttcctgggaattagctttgtctcttgttcctggagcaaattcaggaaaattgcaaggtcatgtacattttcagcccagggcatgagtcacttgatccctgctgtccagagctggacccggagatgatggccaggactgtccccttgcagggaggccactgaggctggcagggccaagactgggcagtgagccactccaggcgggaaagccctttgtcactggagctgctctgaacgctgccgccaagtcgcaggcagctgttgtcatctgctcagcgtccttccccttccccggcaactactcctcctgctgtggggaacctggcccacccgactcctgtgttctcagggcgctgcccctcgtggaacctgcccttctggtcaccaggacattgcctaaaccaggcctggccagtcatctgggaggggccaatgccagacaataagagactttcctgggattttatagcgatcctgggagagaagagctctgttttatttgggggttgctaaactaagccacagctgccaccacggacggaagaagcttggagtgaaagaatgaagccaaggcacagagacggagagacaaggagagggagagagagagggaaaggtagagacagagagagatgtggggagggagagagagacagagagatagagaggtagagatagagacagagggatatagagagggagagagagacggagacagaggatgaaagagacgagacacagttggagatagagggagagatgcagagacagagagagatagagagggagaaatagagacagacagagctaggaagggagagagagacagagagaggaagagaaagggagagacacagagacagagacagagagcttgagagacagagagagaggcagaggaagaaagaggcagaaagacaaatagagagacagagacagggagagacagagacatagacagaaagatggcgagcactccagcctgggcaatagagcaaggttccatctcaaaaaaaaagagagacatagagacagagacaggaaaagacagagagatagagacagagagagagaaaaaagagagagagagagacatgaggacaaagagaaaggtccacaggcactgagcttgagtcacccctggttgcagccatgcctgaaggcagctctgcccgaccgctgagttccacagcccagcatctgtgatgggctgcacctgtgtattagcacgttactgataaggcccagctgctttaacaaatcggcccgcctggcgtagcggctccggcacagtggacgtttacttcttgctccaggccggcgacccaggcagctccacaggtgacctgaggactcacggtccctcatctgggctccatgaccccccagggccccatgtgctcctcctcctggggttggaaggggaatggaggcccagggtggacagcaggaagaagacacgtggctggaggcacaagcccgcggcggcctcagcaacaggacccagctttccttcctgcgaggcatgagtctggcccctgcccccgggctcctgaccctccagccaacccggcctcagaatgagtggccccgagagggccccgggccacagggctgtggggacacctccagctgtaacaggcggcaggaccaggaggtgagcaaggggggaaaagcttccagaagttttcccagacgctgcgaccctgaggctgggccttcaaggatgaatggggcgagagtgggagaagggcttcctgggcagaggatgtgcggctgttgggacagtggcatctctaacaaaataccgtaggtggggcagcttagacacaacaaatttacttctcacagctttggagagcgtggaggttcaagaccaaggtgtgggcagctttggtatctgctgagggcctgtttttgttttttcgttgtttttgaggttagagtgcagtggcataatcttgactcactgcaacctctgcctcccaggttctagtgattcttctgcctcgtcctcctgagtagacaggattacaggcgcccaccaccaagactggctaatgtttgcattttttgtagagacggggtttc[145 bp omitted]cctggtcttacgcgatcctcccacctcagcctccctaactgctgggattacaagtgtgaacgtctctttatgtgagtataggaatagaacagaagggggcacttcctgcctgcctcctcccccaaacctacgctgtttgggatttactgggaggctgggagatcttctctctagaggatgggatgggcgtggacaagttgttatctttataatgttcttattagattaagacctccaaagggtgctgggcgcattggctcaggcctgtaatcccagcactttcggaggctgaggtgggtgctattgcttgagctcaggagttggagaccagcctggggaacatagcaaaaccctgtctctataaaaaattagccgggcgtagtcgggcacggtggctcacgcctgtagtcccagcactttgggaggccgaggcggggggatcacaaggtcaggagatcaagaccatcctggctaatacagtgaaaccccgtctccactaacaatacaaaaaatgagacgggcgcagtggcgggcgcctgtagtcccaactactcgggaggctgaggccaggagaatggcgtgaacccgggagatggagcttgcagtgagccgagatagtgccactgcagtctggcctaggcgaaagagcaagactccgtctcaaaaaaaaaaaaaaaaaaaaaaattaggcgggcgtggtggcgcgtgtctgtgatcccagctactggggaggcttaggtgggaagactgcttgagcctggggaggtagaggctgcggtgagccgagactgtgccactgcactctagcctgggtgacaaagtcagatcctgtctcaaaataaaaaagacccggctgggcgcggtggctcaagcctgtcatcctagcactttgggaggccaaggcaggcgcatcacctgaggtcaggagttcgagaccagcctggccaacatggtgaaaccccatctctattaaaggtacaaaaatcagctgggcatggtggcgggcgcctgtagtcccacctactcaggaggctgaggcaggagaatcccttgaacccgtgaggcggaggttgcaatgtgccgagatcatgccactgcactccagcctgggcaacagagcgaaactctgtctctaaataaataaataaataaaaaccctcaaaggggctagtctcacccccccaccagctgtccccaatgacatcctcatgattaaagctgaaatgaatcaggaacatgtggaccacatttgaagtgggttaaaaatgagaaagcaaggttggccacggtggtttacacctggaatcgcagcttttttacagttttttttttttttttgagacggagtcttgctctgtcacccgggctggagtgcagtggcacgatcctggctgactacaacctccgcctcccaggttcaagcgattctcctgcctcagcctccagactagttgggattacaggtgctcaccatcacgcccgcctaatttttgtatttttagtagagacgaggtttcgccatgttggt[133 bp omitted]gtgcagtggtgcaatcacagcccactgcagcctcgacctcctggttgaagcaatcctcctgcctcaggatcccaagtagctggggccacaggcatgcgtcaccacgtcccgctacttttattttttgtagagacagggtctctgctactcaggctggtcttgaactcctgggctcaacgaagcctcctcctccgtcagcctcacaaagtgctgggattacaggcgtgagcaaccgcgcccgccccacaccctaccttataacatcatctgaaatcattacacagggctctctcctccccctaggaccgaggactccctaggaaacgatgccaagagtctagctcactgttctattctcagagccactggcaggcacttaatacatatttgaatgaatgtgtctccttcgactttaaaaatgcccccaccgggaagtgcgtgggggatgtgggaaggccggaaaccatttctgcagctgccagtccccttccaggccctgtcatgggatggagcagggcatcactgtgcggcgccttggcctgtggatcccctccccacgtttcttgcccggtgcaggccggaaggcaggcaggtacaagcaaggagtcggctctacgcgcagagccccaggggagcggcccgtgctgggcatggcagtcccagcagtgcatttgtctagctgccggccgcgggtccggggccacttcctctctgctccttgctgatgtcacggtggatgaagacaacggggcacccacgtcaccgctgttctccccctgaacacggagcagttattctagaactgttttcccctcctcgcccaggaaagccagatggaaaaaccctcttgccctgaaccagctcattttctggccagtcgccccttccagcgcctgtcccggaaacctcgcggcctagcgcgcgcagcccgccgcctccccgcgccgcgcccgccaccgccccacgcacggaacatcccgcggcgccgcccgtccgtgacgtcaggtggcgagactgtgacgtaacacacggcggcagggcggtgccaggacgaccagccacgcgtcgccatggcaacagcgggcggggaggggcgggcggcggaaggcccgcccctagaagggtgtggaaaccgttagaccccctttcctgcccgcgcgcgccctcgcggccacgcgctttcggtgtcccccgcgggcagcggcccggcggcctcgtagcggccgcaaaacgccgtggccgtcgcgcggcgccatccgttgtcgcaaagcggcgcgagaaacgcccagccgggtgttggccccgccccgcgctgtgacgtcggcggcgcgcgcccccggcgccgtggccgcggctgcgcagtggggcgcgtatggctgccgccccccgctggcagacgctggcggcgtaaggcgcgcgggccccggagcgggcgcggcggagcgcggcgagcccggcgcctcccgtcccgaacatgcggaggccggcccaggcggcgcgggagccggagcgggggcccaagcggcaccggagccggagcgcgagggggcgcggggcccggagcgggggtccgcgctgcgctgctgaggccgggccggccgcccagacgctgcccgcgggcccggccacggcggagccaaggtaacgacgcgcgcgcccgccccggccccttcgccccctgcaccctggccctgggcgcccccagtgacccccggcgcccccgcccccacactcggtgtccactgccctcctgcgccctgccgaccccgtgctccggaccccagcgccccccaacccgtctaaccgccccgcaagctgacccccacactcagggccccaccgccgcaacaccccgttgaccctgcactcgggaccccagcgtcccccaccgccctaacccgcgctcaggacctccggacacagccccacgctgacctccacactcaggagtctgccgccccagtgaccctcacactccagaccctgcccccgccgctccagtgacccccccactctgcaccccggtgactgtcgtgctccaactctcctgccctccgctgagcctttagtccccaccccacctcccgccttcttcccccacccagtgctcaagcccaccgcccactcacccgcgtccctcacgcctccccgcgttctggtcccgaggcccctgcccacctggccccatcgcctcctcctgtcttggcctggcccctccccacgcagctgtgtccccgtcctcactttgtggtcctaaagctcttgagggggagagcagggggtggtgggggggaggaaggtggtctgatccgcagggacctgttgcggcactgcctgggaactcccggctgggctcgctgccccctcccccttccgctgtggccaccggctttgttttccggaaacgcacggatcagggagggagggtgagatgtctgagcagggcctgcggtggcctcaccgatccccgatccccgcctggctcctctctcccaactttcttaggggaagactttcccgttgaggggcgtgggggctgagaggacattcggggactgttgcgtcttgagccagaatggctttgggacagctggttcttattcctgtggcctccggatggcattgtttgcaggaagcgggccggagggttgtctgtgtaggtggagtccagcatcttctccccgttacgctccaccgtgtggcccagtgcgccggggcggtccacaaggccatgtggggctctgcctccccaccccaggacatgcaggagccttcttggtgtttcctggctcccggaggccctggtagctcgtgggtgtgggagctgagcaggaaggtacaaaggctcctgtctgggggaaaaacccagccgtcccgccacgggaaggcgctcggattagggagggggctgggcgggggttggcagctggggatggaagcaccccgggctactctgccctgcacagcccagcctagcctggggtgcctctgtgcagaggaaagactgtgtgccagggcccccaggtttgaaagggggaagttcgcggttgtcactggtactttgttttgttttcccctgtgtctccaccaaaacgaaacgctctgggctgggctgactgatgagtttcccaggcaggcagcccccgggagtgtgtgcaggtacgcgcacgcctgccttgacgtctctagggccgagagtgttttgctcagccccccacagtgagctctgagagccgctcctgcacagacgagagggaacgggagacctgcatgcaggggagccgggtctggacggggtcccaatgggagggccaggtctgggggtgagaggccaaccatgtgtcctgcaggaccgtgcagcgggcaaatggggtgagatgttggaggagctggctctgttcccttcaccccggtgggaggcgaaaccccaagtggtctgtagtgtctggatttactgtgcctgctgtgccttcggacttccttgtgtgtctaggggcttcctgtctgatttgaacctgtctagttcctctgaagaggatgagggagcagcgcctcattgcctgggctctgggcaggtctgggagccaggccgtttgcaggatggcccgcgatggtgcagcactttgtgcagacagattttgtggaattgccgatttgggtttcttcttttcttctcctcctttttaataatacagtaattactctgggctacaaaggaagtaggcgagggtttttttaattgaaagttcctgttgctcatcccaagcttaggggaagccagtatgccagccattaatttggggattggggtagtcctgttggtgtgccaggcacggttgggagggggggcactgtgtcttttggaactggtgggggttaccgcgcgcccgagtggcagactctagcgccccagcagatgcgtccgcagagccactgggacggacggaagctgagcttagggacagccggagttgcttgccctggggcatctggagagggggatcctgttgagcgtttgatgttgcctcctttctgcaccccccaccgagctgccccaggcccccaggggctcatggtccgtcaaggccttgaccgaggcctggcggagggcgggtggtggatggaggcagcgctgtgggtgctgttggggccgagtgccgggcacagcctggcaggggctgcgggcctcgggtggcagtgggcaggccagcatgtggggctggctgactttctctgaacccagaggggacacagggcccatgtgaaggaggcctggcccgagtcctggttagggttgcggtggtggcgggcagctgtgggcttcgtcctcaggtcagcctcaagtcctgtgtccagctagggctcggtggccgtgcgcgtgttgggtcgagctctggtgtcaggcgtgccgggtccgcctcccccatcccgcggatctgcagatctgcaaatgctccgccggcagccacacgagagaacctgttggttggcggcctctgtgcaaggccgtctgagtgaggcctgcagtctggaggctccctaggtcgggaggctccgcgtctgcttcttcctcattctggagttctcgtggggcccgtgctgtggggcttcctgggaagtgggtggagcgcccattttacagatgaggaagtcgaggcctacctggcctgcttgggtagaggagaaggtggtgtttcccgagggctgactcccacacctgtgcttctctggtcacccgccgtgccagtgggagcagtgacagcgaggggtggtggccctgcggccaggggacgggcctcaccgccttccccatcctctctgctggctctgtccagagggctgtgccgccctgtgactggcacgtgggtgcagccgtctgctgggtgggtctgtccgggagcttgactggcctggctgggtgggggggggtacccctttgtgctacctcagcgagggctcaaagtgagggtctgggaccaccagaacggtgtattcaatgcactgcgggcagccctgcagcgggcagggattgagtgaggggtggggcctgcctggctcctggcaagcacccgtctggcgggcggggcccagtgagcctcctccctttgccgggtcctcctgtagtggggcaggaacctctagcatcccacccttgctgccctttttctgccccgctcaccacccacatcaacttgtcaccagcaagggcatgggacaaagcaggacatgccccgggtggccagcgtgagctagctgtgcccaggagcattgcccatgctgtcccccaggcactgtcctgaagccctgctgggttctgagtcctccaggctccgcggccccttctcgccctgcccagagtctctggccaccaccgctgcttggggccctgcaccagcctgtgcgcccgcaaggttgccagggcccctctgcaggtgcagcgtgagctgtgtcctgggcccacaggggagccgcttctcagacccccgggctggccccaggctcccccggcagcactcaggcggccctggcccccggtgcggctgactgttcggggcacgcgtctgaggtgtggggatcatctcccccttgctcagagcccccaacgtgtcccctgcacagggaatcggggcagccccctgccagccctgcccagggatccctcctgtcaccctcaggcgtgctcctgggtggcccagcggcctccctgcaccgtgaggcccgagacagtttcgcgtgacatcatgttgaaaacagccagctctggccgggcgcgggggctcccacctgtcatcccagcactttgggaggccgaggtgggcggatcacctgaggtcaggagttcaagactagtctggccaacatggcaaaaccccatctccactaaaaatacaaaaattagccgggcgtggtggcgtgcgcccataatcccagctactcgagaggctgaggcaggagaatcacttgaacccgggaggtggaggttttagtgagccaggatcgcgccactgcactccagcctgggcaacagagcgagactccgtctcaaaaaaaaaaaaaaaaaaagctggttctcccttgatgcgcatctgctgaacttctggggcacgctggggtagagcagtgggtccctccctggagaggccatggggtgaggaccgaagctgtgggtgccaagtggggcaggcagcccagtggagtggggcaagagactctggtctggccggcctgacccgtggggtatgactcttgttacggcagattccatctaggagcggaggccacgcgtatgttcccgggagaggtgggaagtgcatcccgtggcctatcccggggaggtcactcccattccatacctgcagggggagctagctgcctcacgtctgtgtctcaggccgcgcagaggagggggcgcaggtgagggcagcgggaagaaagactgcaagaggctcgggggtcacgggccagggctggcccatcactatttattcgtttatttatttatttatttattttttatttatttattttttttaagatggagtcttgcactgttgcccaggctggagtgcagtggcccgatctcagctcactgcaagctccgcctcttgggttcacgccattctcctgcctcagcttcccgagtagctgggactacaggcgaccgccac[187 bp omitted]gatggagtctcgctctgttgcccaggctagagtgcagtggcgcaatcttggctcactgcaagctccgcctcccgggttcacgccattctcctgcctcagcctctccagcagctgggactacaggtacatgccatcacgcctggctaatttttgtatttttagtacagacggggtttcactgtgttagccaggatggtctccatctcctgaccttgtgatctgcccgcctcggcctctcaaagtgctgggattacaggcatgagccactgtgcccggcctattcatttatttatttagagacagagtctcgctctgttgtccatgttggccaagctggtcttgaactcctgacctcaggtgatccacctgcttcagcctccctcatagctgggattacaggcgtgagccaccgtgcccggccctatcgctatttaaaaggcagagaaaatcttagaggtttttttattgtcaccagcggtgtttcgttgatgcgtaattgcctttggaggcttgaaaaaagttgtgcttaaaggtaatccctcaattatctggaaacttccaccctccagagtgaggcaccccaagtcctggtctggattcgtggacagagtccctgcctgtgaggcctgatggccagtcctctcgccttggccgtggtgcttcaggccctgttgcaggtgggacccgccctccttagggaccttgtttcccaggtgatgctcatgtaatctgcggtgacctctgccccttcccatctgacctctgtccccaggaaagatggcaggcgtgcgagggctcatcctgtccgcggcagttgtgcccctcgggcttctgctccagtggtcctggggcagggcagctggcgctgatgcccaggctctgcctggggacagttcccaggacgggagcctgagggcagcgcacgggaccagcgtgaggacacggactggcccgtgtctgcctctgacttgctgggtgtgcctttgagttcctctgagggtgggtgcgccgagggggatccagctgggccctggccacgtgcaggccagccagagccctggagcctgcaggtgggctgggacagggcttgcgaccgcaggggtggtgtgcgtttgcgctggcgtctgcacaggtgtgtgcgtgctgtgccatcacgctggtcaggcctgtacgccgtggagaggggcgctgtgtggggctcgctgcctgagccctgggtggaccgtggctgccccatgagttgtcggggacctccgctgccccttggacctcgcccgcggccctgggcaatgggtgtggtgacgtcctggggcccccatgagtcagctcgtcctcgtgcccgggcactggcctctccttcctgtgggcgcacagccccggttcctctgaaagcttcgtgggccgggacccgggatgagctggttaaaccctggccctgtgagcaggaggtgtggcttcggggggcggccccgccctgggctcagacttgatcctgcaccggagggagccattctggaaggccgctgccccgggccctgtccctccccctctcatccccagggtgctggc[185 bp omitted]gtggcaggcgcctgtactcccagctactcgggaggctgagggaggagaatggcatgaacccgggaggcgaagcttacagtgagctgagaccgcgccattgcactccatgtgggcgacagagtgagactccgtctcaaaaaaaaaaaaaaaaaacgcaaaaaaaaaaaagatcccgtcacactgacccagctcactgttctcttaccagccttatttcggtgtggtccttagagcatgagccacttttttttgctgggaacataatccacgtttggtaaaattcggcaacgtgtgcacgcaagtggtttttgtacagctgacccttgagcagggtggggtttagggcagcagcccctcatgtagcaaaataccctcgtatagctttcgagtcctccagatgccgctgccgacagcctgctggtgaccagaggcctcgggaggacacgtggtccgcgcacacatacctcgtgtgttgtgttaggtgctgcgttctcacagtgagggaagctggagaccagaacatgtggagaaaagcagaaggaagagaaaccctgtttgctcttcacgcagtggaagtaatgctcatggaagcctctgtcctcgtcgtgttcacgttgagggctgaggaagggagggtgggtctcgctgtctcgggtggcagagcgggaaggagccaggagaggctggcgccctcagggcaacctttattgaaaaaatccacgtcagagtggacctgtcagttcaaacctgccgtggtcaaggctcctctgtgagtgcagccaccacctgtaattccagagtgttctcatcacctgcaaagggagccctggccccatcagcagccagccttccacaccatcctttccagaaccttcccaccttcccaaattgagacgctgtcttcgtgaaacgttcactcccgtgccctctccagcccctggcacccccatcctactttctggctctgtgactctgagggctccagggacctcctaggggtggaatcacacgggatgaggcctggtgtgtttggcgtctctcactgagtgtgacaccctcggtgcatccgcgccatggcccgcgtccgagtctcgctcctgttcgtggctgagtcgtgttccggcgtgtgggtggccacgtgtttatttctgtgatagatgtttgcatggcatccgcgtgtggctgctgcgagcacccgtgtccggttcccgtgtggctgcgtgattcttctgtcaggtggacttctagcggtggaaccgctggtcacagggccactcccggttggaccatttgaggagccgcagacggccatccatacctgcactgtttgggtcccctgccgggttttggggactggatctctgcacagcgacgaccactcccctcttccggtgacttggtttctcctgtccttcggcccgatgcttctctggcctgcagggcatcagggaccctgctgtcctgatccccatgccgtctagaaagccaggggtcctgcatgtgcccggtgtccccactgccttgtcaggcacagggccagatcctgcaccctgtgacgagcacggccagtgggacagacagatggatgtgctgcccgtgaccttcgccacagcgagttcagaggccggaggcatccagtgtccacagagtgaccggtaggccccagccccacaggatcatcgaggtggccctggcctttcgaggccacaaaaatcaacgtttatttttatttattttatttatttatatatttatttatatatttatttatga[131 bp omitted]caccacacccagctaattgtttgtatttttagtagagacggggttt[144 bp omitted]ttggagaacttgaacattacagcaacatctgaagaagatgttctttcacaaacctcagattccaggagatgagcaccgtccgctttccagagaaaattgtctgaggcctctgggagacaggagggggtgcacttagaaacagccaaggcctccttccatgttgggacggacgggccttcctgggctggcccggcctaaatctgctgccgcccaccgaacaccaaggcaccttctcgtgccccagaggccaccagcacccgtccccctgcctccctccagccagtgtcaggtggggacctggccgctggaagggaggtgtcacctgctctggggcatccaggagggaggggctgcgggagttttgctggagaccctccaggtgggggttatggggtatcatggcggagcgtgttgggaagttttcggtgagctgggcgtttattcgccttggtgcccccctagatccctgggtgatccccgtgcccagttttcaggggagaccatgggggtcagagagctggccaggcgggtggtctgtgtctgtcccctgctgttgaaatgaggggaggtgagaggagacgccgtgtgcctggggagg[142 bp omitted]ataccctgtctctactaaaaaaaatacaaaaaattagccgggcgtggtggcgggcgcctgtagtcccagctactcgggaggctgaggcaggagaatggcgtgaacccgggaggcggagcttgcagtgagccgagatcgcaccactgcactccagcctgggcgacagagtgagactccgtctcaaaaaaaaaataaaaaaaatcaaagatgggggcctgctgggaccgtttgatttcttcccattcagaccctgccagatcctgaggctggcccagctgcctgtgtcctctggggctccctgaggaggcagcaccagctgtggtgtgcatgacggacaggggtcccagttggggggtgcagcctcccgatgggccaggatgggggatgcttgggtgccctcaggatgtgcaggctgggcgggaggaagcggtgagagtccacccctccccaccttcctcttctctgctgtttttttttggagacagagtctcactgtgtcgcccaggctggagtgcagtggtgtgatctccgttcactgcacgctccgcctcccgggttcacaccattctcttgcctc[189 bp omitted]gctgttttctgactcaacatcatgaaacaggaccttaagctgagaagtggtgagattggggccatcctcatttccacataaggccgtgttcctgtttactgggggctaggacttggcatgtctttttcggggatagcccaacccttctgtgtgaaaggggtcgtgatggtcactgcaggacagcaagcacaccttggcccctcagtgggcagtgggtgcagggctggacgagggcccagggggcagaagctagtgcgccgatagcgtgtgtcatctgcggcctgtgagcactgatgatgcccgagtggcggagggcgggatgcttccacgtgctcaactttttttttttttcttgagacagagtcttgctctgtcgctcaggctggagtgcagtggtgccatcttggcttactgcagcctccacttcccgggttcaagtgattctcctgcctcagcctcccgagtagctgggattacaggcgtccgccaccatgcccggataatttttgtatttttagaagagaccggggttacaccatgttgtccaggatggtctcaaactcctgacctcaagtgatcttcccacctcggcctcccaaagtgtacgtatctttttagtaacgatatatttgacgatgattaaaaaaacccgatccttgaaggcccttgatagatgctgaggtgagtacaggcctgactctgagggtcatgcgcctagcaggcgtcgcccggtgcacagggccaggagctgagtcgtgcgggactggatggaggccaggggatatagaagacctgggcagctccccaggaccaagccctctcgcctagggctccccggggagttaggccgaaccctgctgtgcccttcactctgcagccctcgtggggatcatcacagaggcaggagctggcaaccgaggtgactgccttcgagtggagggaaaccggggcgggatgtcgcccggcggctcccacacgatgaggggaaaaggcactccagtctgggtggcagagcgagactccgtctgaaaaaaaaaacaaaggaaatgtagaaacgcagcccacccaggttttccacggccgttcatggttacgcttctggaaggacccgtgtcctctcagatgtagcaggattccgatgggagccaccccgggtcccactcgcccccgggacctgccgtgggagctttctttcctggtggggtgcctgactctgcctgcacgttccccccgctgtctgtggcaccacttgggaccggggacccctgcccccctggcaagaccaggtcagctctgcccccgggccacggagcaggaagcagagctgaggctgctgaggtggcgcagggttgctgtgggggcctgtgcgccatgggggcctgggtgggggtgttctcacttcccccggagtctggaaggccgtctttgtgatggatttgatgcagatgtgtccactttgcttttgttgatggcgtctgaggctctggagtccatggcagccttgcctccgtttgcataatctgaattttgggaaaattgcccctatgtggactagttgcagggacagtgccctccgccaaggctgccggtggtgtttgccttatgtgtccggtgctgggtgagtgccagcttttccctggtcagctctgcccgtggccctcacctgtggtctgtgccatcaccagggcgaggctgacctgtgggacggggtccctgcacagcctcgccgtcccccacatccccccaacagggtctggtcccagctgccattgtgcagccttgccccctccccccgcatcagggtccggtcctggccgctgtaccgcgatcacctgtggccctcctgtgttctttacctggactcttgcctttgctgatggcgacctgtgacggctcagctgcgttctcagaggccggctgtcctcgtgggcgtctccggtgcagtcggcgcggtgaggttggcttctgccatggacggggccttctcgtggtgatgacagtcgcccttggtctggtgtctgcagtgctccgaggaccggccctgcccatccctggcgttcactcctcagcttcctcccatggggtgggcggcttccctcctctccctgatttgtggggtgtttctcttttgcacctgatgcgttaaacccattaccggcctaggtcagcctgaggttggtttgtcctggccgcggcagctcctgcgcccctccattgtggagggcgcccttccgtctgccctgcgtcactgggctgggcctggccccgctctgctgtggccctggcactggaagtatgtgctgccctggtgttcgggggctcttgggtcctggggcgctgcaacccctcattttctttccttggggtgcagatgaattggggtggcagggaaccgagcccacagtggccagcccctgcggccccaggtcagagggcagggccggcctggacagagctgcccagaacggtctgcggccgggtccacatgagtctaggtgcctctgagggcactgggacggcggtggcctgcacctgcccagcccagtgaggtccctggcctcccttcagctttgccctgggctctgggctgagggctgtgtggtgatgtcagcccagggactgtgacatcactcagtggagacagtcagagaagggggctcccggggccctccccagggaactggccctgggcccagaccagatggaggaccccgaaaagaacagggcaggtagcagcctgaggctagggctggggaaggggatgggagctgacggggagagagcagccccttgtgggatggctgcaatcccctcgttggcgcccgggagccatccttggcgtgtgacccggagccggcactcgccccctgggacggaatcgtggctgcgtgggttgggtggaggctgggtgaggatcagcgtcccttcgtccctccctggggttgttgcttttcgctgtggccctcaggcaacagggcaggcccccaacccccaggcctgcgtgggcactgtgggtgcccagcctttacgtcctcgcttccttccaggccccggccttgtctggcttcccttgggcaccccctggggttcggagagccccagaagaggccgggctcttcctccttggtgatggacgggtgctgggccctgaccgagtggtgaccgcctccagggagtgatctgcgccctcggaagctgctgagtcttggagtggcggctcttgtttgtgggggcagggggagctgggcacccgccctgtgcccacggaacacagcccagggtggcggccctgcctgtcctctgactgccctcctgctgctgctgctgctgctgcgagggcctcaggcgcaggcggtgactctcggggccactcctgaggtgggggatgtgggctagcggccaccgtgggcggcaggtgtgcaagcagtgctcccgttttccactgggctgcccttcaccggctgtgggtcagcgccccccactgaggctcaggctgaggcgaggctccgcggggtgggcgtgtgccagggtgaggctccgcggggtgggcgtgtgcctgggcgaggctccgcgagtcgggggcagcgcccaggtcaggggcttctccgtccatgtcaggcttagggtgggtgtggctgggccctccctctgctgtccgcccacgaccccctcagaggggctgtcgtgagatgcttggaggcgggatccagccctgagggtgcagggagtgctcagcggacccccgtgccactgctgtcaccggaggaggctgctgctcggctccgggctccatctgcaaagccgggtgtgcatctgtgtggctcagctctgcagggcacagtggggtttgctcccggccggccctgaggccgggcacagggaggccagtgctcatccagggggccagagagaaagtagcaaccccaacctgcctgggccacaacagccaagaccactgtatcagaacagacgccagcggggcagcctgctcgttggccgggcggagcagggtcggcacacagcccgggctggccttcaccccagctcccgacagcgttgggtccctgagtgcagggcctgcccctttctcatcctcctgcctccaggtcatggggcaggggtgccgagaggccctgcgggagccaggacctgagaggtgatggtcaccacccagacgaggggccgggggtcgcacaaggaggcttccagggggatgccaggagcagtggggccctagacccagcagtgggtagacccagcagggcagcgctcacgtcacaggttctgggggttggggcttgtcatctgtgcaggtgcagctgggatggggatttggtgctttttgttctgcaaaagccagaacgcatgtagctgagccaagatcagacggcatggtgcctcatgcctgtggtcccagctacctgggaggatgaggcgggaaaattgcttgaactcgggaggcggaggttgtaatgagccgagatcctgccactgcactccagcctgggtgatggagctagatcctgtctcaaaaaacaaaagaccacgcatcctagccggcaaggccactctgtactcagacccggcagctgtggctgtggcacaggcgcttaccctgcggcattggccctttcagtggttggtgttgaccctccacagaggggctgggtggggtgtgtccagtcccatctgggtagactgagtgttggggatgggagagtgtttaaggaggtggcggttacagactccagcatcgggacacggggccgtgggtcatacccacatccgtgggggctgtgagacagccgtccagaagcttctgtctccgggccaggaggacaccccagagagccccaggaggctcgttccggaatttagggctcagcctcgatgaacctggccaggcggcggttgatgggttaattcagttaatcacacatcactcagggtttctcagcagaaggaactgaccaagccaatggctcacctggaagagagaaggagggaggaggaggggattctgcagagggaaggctggtggtggcgccccccttcgacggtcgtgccctgatgctgcgtggcttaaacggtgccacccggagattggtgggcgggattgggcctctggggtccccggctgtggagagggcaaggcaggggcggctagaaagaaaagcaacctggacgcaggccccacctccctccaggcagccccacaggcccgagggccaccgtgtcaggagggatagcctacacggagagcaggccagtggccctgtgcccaggagggtgccttgcccagcctggaggcccgcaaggatgagaagcagtgtgtgcccgggaggtcacgtgggcaccacagacgaaagtggagccgggggagagatgtcccgggatgcaccaggcgctcgtgcaaaccaagtgctgagcagagagcagcctgggagagaagggggctgccccgagcggcttgggtggccgggcctgtgggagaccttgggtttgctgttaggagggacagtgagcgcaggcacctctctctccacttcatgtttgtcctcactgagggagccgagcagatgcctttgcccctgcaggtcccccatgtcccctcgcccggggcgcgctccacaggctaggccactttcacagctcaccacacaggcagagactggagggtgcgcaggaccccgggtgactgcagacgtgggcacagaggggcctctgagggcgtctggcggcatttgagcagctgccagatctcccctggaaacactggggtgtgtgctcggtgggtgccgtgtgtggggggtatgtgctcggcgggcgccgtgtttgtggggtgggagctaggcgggcgccgtttatgtggggtgggcgctcggcgggcactgtgtgtgtggcacggccactgcttagggccccctggagctgcggggcacacggcagagccagcctcatgtcaccacgtgcttcccccgtgtgcagggaggggttggaggtgtgcgcttgtcttgtccggaagccgggtgttgggacgcgtcctgacgacggcactgcccacatcctaatgggacacctgagggacatcggtggctgagtaaggggcccctcccgagcaggtctggaggcgttggaagcacagcgcagcctcatggggcacctgcctgctctgcctggaattgaggggcgattgggactcccactgcccccaccaaagcctgtgcccctgatgtctgtccagagcacggcttccttctcggtggttcccagaggccgctgggcctcgcttcgtcctttttgggcagcgagtgtgtatgttaggggaacaggagcccggcagggccgtcttgcagggctcagcagtgggggccgtggggttggtgcaccagggcaggagagctgcccggctcctgctaggtgtctagagggcctcagctctcccaggcactgtcccctgtccccccatctcccctgtcccccccatctccccatccccccgtccagggccgcagcagctcagctctcccaggcactgtcccctgtccctccgtccccccgtccagggctgcagcagctcagctctcccaggtactgtcccccgtccccctgtccccccgtccccccgtccagggccgcagcagctcagctctcctaggcactgtcccccgtcccctcgtccccccatccagggctgcagcagctcagctctctcaggcactgtcccccctcccctcgtccccccatccagggccgcagcagctcagctctcccaggcactgtcccccgtccccctgtccccccatccagggccgcagcagcccagctctcccaggcactgtcctccgttaccccgtccaggcactctccccccgtcccccatcccccgtccaggcactgtcccccctccccccgtcccccccacccccgtccagggccacagcagccggtattgagtgtgggtatgagctttggctctgggtcctgagcgtcccttccccaaattccccatgtggcttcccagtctgcatctccatctgctcccagggtgcgagttggtttttgtattaataactgaggtgtgacactcgggctgtacccgctagctgtgtaactcatgcagctcagtgcctttagctcatcatgaggctgtgtctctgtctgtgccatctaatagaggatattttcatcctcatggcgagaagggatggatttgttttcctcgtgaagtcggtgacgtttgcttttcaggtttggttggtggcctccagtctcttgtcctcaacgagggttttggcagctccctctcagtggcctgtgagtgtccccactcccttgtctgggaaagggctggagctctggggctcacagagagggtgggtgtgatgtctttttcctgacgtggcatcggggtgtcttacctgcccggacacctgcctgcgcagggtagcacagaccctacaggctgcggctgagcccccagcacccgccccacctttaatgctcggcccccagcacccgccccacctttagtaccaccctgagtcccccagcacctgtgccacctttagtgccaccgtgggtcccccagcacccgtcccacctttagtgccaccctgagtcccccagcacccgtgccacctttagtgccaccgtgggtcccccagcacccgccccacctttagtgccaccgtgggtcccccagcacccgtcccacctttagtgccaccctgagtcctccagcacctgtgccacctttagtgccaccgtgggtcccccagcacccgtcccacctttagtgccaccctgggtcccccagcacccgccccacctttagtaccaccctgagtcccccagcacctgtgccacctttagtgccaccgtgggtcccccagcacccgccccacctttagtgccaccctgggtccccacatccctggctacacattgtggctcccacaaccccgtttgggttcacggtcctcctgcaggactctcggaactggggagtgagagtttgttccctgctgttgtaaagggcataacctgggggaagccaggcaggcagaaacccccacccacgtccagggccccatgtagggtccggagcttccctgccctccctggtgccagtcctgaccctaccacagccgaatgtctgcgtcagcacaggggcgtgtaggaagaaaaggcgtcctgcttaggagataggtacatccgggacctggggccttctcgccctcagtccacagggaaggtcccccggatggcgcctgccccttccccctccctacccggcttctgcacgcagtcccctgagatggcccacacgtcctgccgctttctggcaggggagagctgaggcctgtgtcttcaggatgctgcctctcgggcagcctccagccctcgtcgagaaaggcaggcagtgtggcgcgagcaggctggcctcaggcggggcctctgggcagtgtcccctcgggatgtttgccgtgctggatctcacacccggctctgacacgctgccgtgtcccccgtgtgcctgcgcctggggtctccgtgtgtgtgtctgtgtacacgcatgtggttttgctttcttgtgggctggaaaatctaatagtagtcagggcgtggtggttgacacctataatcccagcactttgggaggctaaggtgggtggatcacttgaagtcgggagtttgagaccagcctggccaacgtggcaaaaccttgtctctaccagaaatatcaaaaattaaccgggcatggtggcacatgcctctaatcacagctacctgggaggccgaggtaggacaat[140 bp omitted]tgagagggtttccagaagaaggagaatgtccccgtgctggtggctcatccaggtgtgggccggtgtgcggcggggcgtgggcagaggagaggcttcgggctccggtttcctctcctgtggatgcgtcgcccccgcatggtggtcctctgcggaagtccccctgtccgtcccgttggcagccgcagtggaaagacggatggacgggctgtgacagggacagcccagtgtgaccccagccctggccgtcgcggttgtggcattctcgctgtcagggggctgttcccgtggctctcatggctgtggaggggcgtggagggggcggtccccatggccagaacctggccgtggcgggtggaggacttgaggccggctcagtggtcagcgctgctgcttgttcccctacacagaggcgttgggtggagctgcctcaggtatccctcctggctggggtgtgtgcgtcaccctgagtctccagcccatgctgaggagcctcgcaggcagggcccagcagcctatactccaggccattgctgtccgtttctccagaaggccctgctggtgggtggtcccaggagctgggcctcagtgggggatcccaggacagtggagcctgggaggggccccagtgttgaggcgtgaggtactgtctggaactagggggtgcccccaaagcggcacggcgcccagtccctgtgctggaagagagatgagctgcggtggggggtgggggactacgtctcacagatccctctcccagggcacatgaggagattcctcccccaaaacgcccaggaaggaagttaaattttaatatgggtctggtttagagaaactaggttagccatgcgtgggtgtttctggatgtttgggcagtaaggagagtcggtagctcaagaaatccgctggccgctaagcaggggtgaggggcaccgactgccatcccttcttcaaccacggccactcggccacatcagtgtctcctgccacctccctcgtgtccagcatcaacacagcactgcatccctgacccagtgcagtggagaaaactcgcatccaaaaataaaccaggagtcagccaaaaacacgcaaattaaaattacaccctggccaggcgcggtggctcacgcctgtaatcccaacactttgggaggccgaggcaggcggatcacctggggtcaggagttcaagaccatcctggccaagatggtgaaaccccgtgtctgctaaaaataacaaaaattagccagatgtggtggcaggtgccttgtagtcccagctactcgggaggctgaggcagagaactgcacgaacctgggaggcagaggttacagtgagtcgagttcgtgccactgcactccagcctgggcgaaagagtgagactctgtcaacaacaacaacaaaaaaagcacacccccagcatggctgtgcccagaagcacagaagtggggtcaccacagctcacgcctataatcccagcactttgggaggccgaggagggaggattgtttgagcccaggagtttgagaccagcctaggcaacatagcaagatcccatctctacaaaaaaaaaaaattagccagacatgggggtccatgcctgtggtcccagctactcgggaggctgaggcaagaggattgcttgagcccgggagacaagttacagtgagctgagatggtaccattgtgctccagcctgggcgacagagccagaccctgtctcaaaacaaacacaaaagctcacagaagcgctggggtgggtgtgtagaagtcagacccccgggagcggcaggtggaggacgactcggtgcagcagccactgtggagacgacctggtggctcctcaaagatgcacagatctcccatccgacccagcacgaccactcccagctatgtacccaggtggagtggaagcccgcagccacgcagaagcccgtgcgcagacgccgccgtggactccagcagccggacggtggctacaacccagatggccgtcagcagaggaggaggcgtagtgtggccctccatgcactggaacacaacccagccatgaaaaggaagaagctctgactcaggccacggcgtggacgcaccttcaggacgccaggctcaatgagacactccaggctcaatgagacacgccagacacagaggacatgccgtgtgtgatcccatttctatgaaatgtccagggcaggcccagccacagagacagggagtaacgtggtggtttattataaatttttcatgaaaataaaatatacagtactctcgtgagtttattatagcccattgattctttttgtttgtttttgttttgttttttgagacagagtctccctctgtcgcccaagctccacctcccgggttcatgccattctcctgcctcaccctcccgagtagctgggagtacaggtgcccgccaccatgcctggctaatttttttgtatttttagtagagacagggtttcaccgtgtcagccaggatggtctctatctcctgacctcgtgatccccctgcctcggcctcccaaagtgctgagattacaggcatgagccaccgcgcccagcctattttctttctttgaggcagtgtctcgctgtatcacccaggctggagtgcagtggtgtgatctcggctcactgcaaccttcgccttgcaggttcaagcgattctcctgcctcagcctcccgagtagctggagttacaggtgcacgccaccacacctagctaatttttgtatttttagtagggacagggtttcaccatgttggccgtgctggtcttgaactcctgacctcaagtgatccacccactttggccttccaaagtgctgggattacaggtgtgaaccactgcgcccagcctctacaaattttttttttttttttttggagacagaatctcgctctgtcgcccaggctggagtgcaatggcacgatcttggctcactgcaacctctgcctcctgggttccagtgattctcctgcctcagcctcctgagtagctgggattacaggcacccgccaccatgcccagctaatttttgtatttttagtagagacagggtttcaccatgttggccaggcttgtctcaaactcctgacctcaggtgatcccaaagtgctgggccttggcctcccaaggtgctgggattacaggcatgagccaccgctcctggcctacaaaaatttttttaaaaattagctgggcatggtgatgtgtgcctgtagttccagctactctggaggctgaggtgggaggatcacttgggcccaggaggtcgaggctgcagcaagctgtgattgcgccatggcactcctgcctgggtgacagagtgagaccctgtgttaaaaaaaaaacaaaaaaaaaccaggttcaaggtgaaaaggattaagtgttccttgagacgtgtcagccagcattcagacgatctagccaaggtcactgctggaggtggcttttcagggtagaagaaacagccttctggaagaagatgccacccaggactttcctcgtgtggaagaagcggttccctggcttccaaggagaggcccaccctcttcaccctcttgttaggggctaacgcagctggtgacttgaaggtgatgccagggctttttaccattccacaaatcctagggcccacgagaattatgctaaatctactctgtgctctataaatagaacaacagagcctgggtgacagcacatctgtttaacacctggcttatggaatatttgaagcccacttttgagacctattgttcagaaaaaagtttttgtttttttgtttttttttttgagactgattctcgctcgtcacccaggctggagtgcagtggtgccatctcggttcactgcaagctccccctcccgggttcaccccattctcctgcctcagcttcccgagtagctgggactacaggagcccacgaccatgcccagctaatgtttttgtaattttagtagaaacggggtttcagcgtattagccaggatggtctcgatctcctgacttcatgatccgcctgcctcggcctcccaaactgctgggattacaggtgtgagccaccgcgcctggccaaaaagatttctttcaaaatatgactgctcactgacaacgcacctggtcacccaagatccctagtggagacgtacacgatcagtttccggccgggcgcggtggctcacacctgtgatcccagcacttcgggaggccaaggcgggcagatcacgaggtcaggagatcgagaccacagtgaaaccgcgtctctactaaaaatacaaaaaattaaccggccgtggtggcgggcgcctttagtcccagctactcaggaggctgaggca[137 bp omitted]catccagcctgtagcctgtggatcaatgaatgaatgaatgactcggaaatcaagatgactccttgacatgtcattcattcatttatttatgcatgacaaggtgtcccactgtcacccaggctggagtgcagtagcacgatcttggctcactgcatcctccacctcccgggttgaagcaattgtctttcctcagcctcctgagtagctggggctacaggtgcgtgccaccatgcccagctaatttttatattttttcatagggggtttcaccatgttcctcaggctggtcttgaactcctgagctcaaagcagtctgcccgcctcagcctcccaaagtgctgggactacaggcctgagccactgtgcctggccaagtcttagtgtttttgaggcacggtctcactgtgtctcccaggctgcagtggagaagcagaatcacagctcactttagcctccacctcccaggctcaagcgatcctctcacctcagtctcctaagtagctaggaccacaggtgcgcaccgccatgactggctaattttgtttttatttttgtaaagatagggtctccctgtgttgcccaggctggtcttgaactcccggcctcaagcagtctgcctgcgtcagcctcccaaagtgtcggggttacaggcaggagccaccgcagccgcccatgactctcattattgagaaatacatttgtaaggctctaggtgcctgtaggtgccgtggagagcaattcctctgatggagctggggaaattgggtaaattgaaacccccggaaaggctttgccgttctagaggctgtgaaggacacgcgtgatccatgggaggaggtaacatgtcaggatgagcggaagtttggaagaagttggtcccaggcctgaaagatcactgtgagggttcaggacttcagtggaggagggactgtagaggttttagaagcagcaagagaactagaatgagaaggacttggagatgtgactgcattgtcgctgtctcgcgagaaaactttaacacgtgaggagttgcctctgaagggtgagcaggggagttgcttcagttgcgctctagtcccagtgaagattctgtgaacctgggggtaatgaggacaaagaacttggaacagcccggaacctcggttgatgaagccgcggccgggttgagaggaccgactgcagttctgaaagacgttctgctgtgggtaatcaatgctatcagacagcatcacgccccacagagaaatctttcatgaaaggaagagtccatcgctgtggccaacttttttgtggtcatagtttaagaagttgccccagcctccagcagccaccgccccaacgagtcagccgccgtccacattgaggcaagacccttctccggggagattagggccactcccggttcccatgatcattaccattgcttagcagtaaagtatttttatttctttattatttatttaagatggggtcttgctgtatcccccaggctggagtgcagtggtgcgatcatagctcactgcagcctccgcctcctgggctcaaacgatcctcccgcctcagtctcccgagtagctgggaccacaggcttgcacaccacgccccgcttaattaaagtgtgtcctttgattagacacaacgctactgcacacttcctagaccacggtatactgtgaacgtaacttgtgtgtgcactgggaaaccagaacattcgagcggctgttgccgtgcggaacccaaggcctgtgatccccacagggtgtttctggcaccggaacgcaggggccacatccaggggggcagtgcttgtgacgccggtgccttcgtttctgatgtggcttactcagctgggagttcctgtcctaacattttcggcgatggctgtgcacccacggcccctcttcacccgcggcccctacgtcctgccggttggcaggaaacctcttcccctgcacatctggggcacagcagcaaactgtggtcccccttcttcagtgagggtggggcttctgtctgtctggagccctagaatggggccaggggtggctggggcctgggtcagggaggacccggcaggatctgtgcagacaggcaggtggctgcggtggctcccggtgcagggttcttggcctcctgggcgggtacctggcttgagggcgacgaggtgacagccgcgtccctggggttgcaccacccgagcgtccagttaacaccacagctgccacccttcagttctgcaggtggggctcctccctcctccccaggctgcccccaccacccttcagttctgcaggtggggctcctccttcctccctcctccccaggctgcccccgaccacccttcagttctgcaggtggggctcctccttcctccctcctccccaggctgcccccgaccacccttcagttctgcaggtggggctcctccctcctcccttctccccaggctgcccccgaccacccttcagttctgcaggtggggctcctccctcctcccttctccccaggctgcccccgaccacccttcagttctgcaggtggggctcctccctcctccccaggctgcccccgaccacccttcagttctgcaggtgggggctcctccctcctccccaggctgcccccaccacccttcagttctgcaggtggggctcctccctcctccctcctccccaggctgcccccgaccacccttcagttctgcaggtggggctcctccccaggctgtccctgaccacccttcagttctgcaggtggggctcctccctcctccctcctccccaggctgccccagaccacccttcagttctgcaggtggggctcctccctcctccccaggctgcccccgaccacccttcagttctgcaggtgggggctcctccctcctccccaggctgcccctgaccacccttcagttctgcaggtggggctcctccctcctccctcctccccaggctgtcccgaggctccttgctggggaccgtcctgcctcccgtcggggcctgcgctgagactgggctccatgccagccggggctggctggccccctcgctccagagagcgacctgcacagagtcccctcagccatgagcccctgtccagacacggcgtttctctgtgggtggcaacaggctctggggccctcagctctgggctcgggagcatttaaggtggtgcagactcagcgaggggctgtgggctggggtcccaccatcccgggagcagggactgcgtgttccttctcaggaccagaggcttctgtcttttcccctggggtagaagtttgctgcctgccccgtgcccagccttgcttaggtggctgttggctccgctggtccctcaagccccgccattccctcctcagctccgctctgcaccgaaggggatgggtccgacccagcctggcatcatcacagcctcgagtggcgtccagcctgccccgctccaccagtggctgctggagaagaacccgagcctgggtcaggccctgggggctcctgcatcagtgcccggctctccggggcctcctgccctccggcccactctccccgctctcagcatcaaccagtcgccatgggcaggggcagctcggtggctcctgtgtccctgcctcgggcctgcctgctgtcatctgcctccctccctctttcccagagcggccctgggcctggatacggggactgttgtgtggcccctctgtgtctgggggtgcgactgctcccctggcttcaggatcctcagggcttctacccgggattggcagtcatgctctcctggcagtacactctcccacctgtgccacccacccacccacccacccatcccgctttacagaaagccccctgagccctaccctgttcgtccccaggcagccacgccgagatctctggcctctgatgtcatgtgatgtgtgcttcccagctgggttccgggcagggacggtgctcatcatgccccggccttcagagctccttccagcccagcagtctcctggctgtgtcctctgtggcctccgccccgtgtcctcagtggccccgcgggggccttgccggtgctcacctgtgcctctgtttctctgcagctgtgagccgtgagctttgaggcggtgggatgtgtcagcagaatgtctcctgcccccgagagcgaccccgaggccactgagaagagcagcgcggcctggccggcccgaacgcctgcgtctcagtagctgggagccacgggcccacgcccgcccaccggccgcagtgatgttctagccacagaggagccaagacctcaggtttccagagacttgggatttgcacggcagcagagtcaccgtggagaggccagggtatcacaaacttatggattttgacaagaaaggagggaaaggggagacggaggagggccggagaatgtccaaggccggcgggggccggagcagccacggcatccggagctcggggaccagctcgggggtcctgatggtgggccccaacttccgcgtcggcaagaagatcggctgcggcaacttcggggagctccgcctaggtgaggccctgctcggtggtaggtggggtcgggaggctgctggcagggccgccccgagtcaccggagcctctggtggggccgcccggggtcactggagcctctggcggggccgccccatgtcactggcaggtgcgttgaatcatcagtccgtcgtggtgcgagtgccacttcccttcgaggaggttctgtggggagagtgggtttctggccctgtcaccttttcgggaaacagttctgttgggaggcaggtggcccagagcaggccaggccacgccgcaaggagcccgatgttaagttgtgaatgactttcatggcccatgtgcacgctgggcgaagccccggctttaacggcaggtgcctgcccggcactcagctcgtgggaggtcttggccagcccggagctggcgtcaggtggctggagtgactgttctgtggtgatgatactgctgtgtgccactcccagcttcaccatgtaaaaggccgcacctggcccacctggctccgtcccttctgctcacaccaacctctcccgggtcggggtctgattgcccgggcaggcgtgaggagcagggccgaggactgagcctctcattggccaggggtgccttccctggggtgggggtgcctgaagatgaccatcaggcctgggggagctctgagcacctttggggccgttcccagtctgtgattagctgggccagggagctgaatcatccccggaaatgtggttaaatttattgctggtgctgccggagctcctgcgggagggcatttggcgtctgttgctggggttgtccggggaacccaggtgcacccccagtcagtgtctgtcgtggtgggaatcagggtccctgggaaagagcgcaggatgggcaggtccgagaggccacggcagtggatcggcctcacgtgggcacccatggcaggcggtgcccatggcacccatggcaggcactcagcccgatgaggttgtcagatgagggaaacaggcccacgcagtggtcatgatgtggctgcatcttcaagagcggccgcccaggggcgcaggagcatgggctgtggcggcctggaccccaggcatgttttgtggccctgcttcccacctcctgcctcactttacccacctgttaaatgaggatgaatggtagttgccactcgtgggcagaagggttcagcaggcagttatgcggcagaagtgtgtgtcctatgagtcaagcagcttctcccaggcgagggcagctgttggggtcactgttggctgtttctgtgttcccattggttgcacccagggccccaggaggccggggtttgagaccccacccgaaccagatcccaccccagcccttggggaggctgctgggattccacctctgcgcagaggctgggcttgggccacgaagcctcactgccggtccgacggcctgtggctcaggaggcccgggctccgtttctcagccaagagactgagcttttcccaacaggagctgtggcctcccaaccccgtgtgtgtgtgcacgctcagacacacgtgcagacacatgcagacatgtacacacgtgcccacaaatgcacatgtgcacactaaagcacacgcacacaggcgcacacagccacaaccacgcatacacaggcacacaggctcatctgcacacacatgcctggcacagccccgtgacctgcagcctgcggggtatggcttttgggaacccagatggctatgtgggtcctgtccttgggcggcggttgcaggctgctgaatagtgcaggtccctgtaggcagatgagagtgacgtgggtgatgccagctttttttttttttttttttttgagacggagtctcgctcggtcacccaggctggagtgcagtggcgcaatctcggctcactgcaagctccgcgtcccgggttcacgccattctcctgcctcagcctcccgagtagctgggactacaggcgcccgccaccacacccggctaatattttgtatttttagtagagatggggttt[141 bp omitted]cttcagcctggcattttgggcgctgtgtgcttcgcgggcagccgcacatcgtggtttctcaggggtgccgggaggccgtccatcggaggacacaccagcccttcttcatctgctcccagcgcagggacgcttggctgtttctggatttgggcccttctgaatagaactaactgcccaaatagaactgaatagcactgggctcctcgagcactccacgtccccagcactcaggactgttggtggctttgatgttgagcctgttgtggactccggttgttgaatgttgttccgttgtctagaatgttctagaatgtgtcgttttttctgtttttaaggtttttatctttgatttaaaatattgactatgctctccttagatgaggctttctgtttttatcctgcttgggatccactgacttcttggatctctgtgttggtactttttcaaattaactttggaaaaatgtgagccattatttcatgaaacgtttttccatctcagctttgctttgctttgttttgttttgtttttgagatggagtttcactcttgttgcccagcctggagtgcagtggcaccatctcggctcaccacaacctctgcctctcgggttcaagcaattctcttgcctcagcctcccgagtagctgggattacaggcgtgagccaccatgcctggctaattttttatatttttagtagagatggggtttcaccttgttggccaggctggtcttgaactcctgacctcaggtgatccacctgcctcggcct[136 bp omitted]tcccaggttcgtgccattctcctgcctc[224 bp omitted]gctggagtgcagtggcgcgatctcggctcactgcaacctccgcctcctgggttcaagcaattctgcctcagcctcccaagtagatgagattacaggtgcctgccaccacgcccagctaaatttttgtatttttagtagagacagggttttgccatgttggcaaactcctgacctcaggtgatctgcccgccttggcctctgaaagtgctgggattacaggcgtgggccaccatacccagccttgctctcattcctgggttctggttctgcgtgtgacaggagtgcttggccctgtccccaggtccctcagccctggctgttttccgtctgcctctgtgctctcctggtgtcaggctgtgcggctgctgctgctgctgcttgaaagtttactctttttctgcagcctccaaccccagaagtccatgtggtgaatctttgattgcttagtggcatttttcggtttcgtctgattgtccattcgctctcagctgagatttcccatgtgcacattcactttggccatcttttcctttaaatctttgaacatgtttgtgctgtttcttagtccattttgtgctgctgtaacagaatgccacagactgggtcatttatttttatttattatttattattttttgagatggagtcttgctctgttgcccaggctggagtgcagtggtactatcttggctcaccacaacctccgcctcccgggttcaagcaattctcctgcctcagcctcccgagtagctgggattacaggcgcccgtcaccacacccagctaatttttgtattttcagtagagacagggtttcactgtgtgttggttggctaggctggtctcaaactcctgacctcgtgatctacctgcctcagcctcccaaagtgctagggttacaggcatgagccactgcacctggccagatcatttataatgaacagaaattgatgggctcaccgttctggaggctggtgagccccagattgagggtggcgtctggcaaagaccttcttgccatgtcatggcaagaaggcatggtggaaggcaggacggcacagaccggagggggctggattcgccctttagtcaggaacccactcccctgctgatggcattcactcatccacgagggcagcgactcagatcctctctctaggccccagccccagccccagcagtgctggattggggaccaggttcccaacacatgacccttggggggtgcatcaaagacacagcactgtgtggagtgacgtctgtgctgcttcttcctcccttgtcacggtcacacctccctcactcacctgtgggacagcctcactgggcgtggccgtggtgtgtgccgtgaggtgtggagggtgccgtctcccggcttgagcgctgagtttgtccccgtggctcaccttgtttctgtcaggttggtttcagcgttgctggggcaaggctgagggtaaacatgagcgactccaaggccagggagccctgtgccaaggtgtggaccttttgggttctcagctgaagtagagaatccagggaggaccccgcactccggccattggagctgtggcgtcctccctcctgtgtgtcccccggaacctcctgagcctctctggagctgttctctgccaggccccgtgggctctcctgccctctgcatgcatcgcgagtactgccggaggaggcccctttggctttcagagcccagagcgcccgacctcctccaggagtctgcagatccacaggcctcagatgctgccacacccacccagcacacacccaggtctctgacacgccagccgcacacagcggtggggttcaggcgaaggtttcttccacagtgcagagtagaagagccgggaaggaccccatcaccatcagatgcatcagagcttcaaaggcccgcccatcaagacgctgccaagagcatgaggccagccaggctggggaggacgttggcgagcatccgcctgcccgtcagggagccacagctggatgatacatcgacagacagcagagggacggtgtagcacacaggcgagggcttgtcctcctcagcctgggggagcgcagctcagtgcttggtggtcagcacgtgactgacactttgccggagaaggggacggctgcccgcaggaagagctacacagccgtgttcgccggaactccgctctggagagtcagaactggagacgggagggcgtgcctcaagggcagatgggcaaaccaaaccccatcctccctgtgagccgcggcacagcaccaggcgggcacacgcagcacgacacggcgaggagcccaccgcaggggcagccttttgggcggggaaggggggatgaatccactgtgaatcccacctccgaagggcagcgcaggaaggacacgcaaatgctggactgaacctgcagctgattcagggggcagtgtcctgagctctaaaacttcaaacctggggcagtgtcctgagctctaaaacttcgaaatctgaccaggcacagtggctcacgcctgtaatcccaacactttgggaggctgatgtgggcggatcacctgacgtcaggagttcgagaccagcctggacaacatggagaaagcccatctctagtaaaaatacaaaaattagccaggttgatggtgcctgcctgtaattccagctactcaggaggctgaggcaggagaatcgcttgaacccaggaggcagaggttccagtgagccgtgatcgcgccagtgcactccagcctgggcaacagaacgagactctgctccaaaaagaaaaaaactttgaaatccctctaaaaataaaatggaccggtggatggtagctgtgaggatggaccgtgtggcaggtttagttctggggcctcggcaatgagtgttgggtgtttggggcacggctcctgttgttttacgaggagaatttcctaataacgtgttacactggggagaacgtaggaggggagcccatttgttctgaaaacgcggggaccagccctggtccccggctcaggactggaggggttgccctggtccctggctcaggactggagagaccagccctggtcccgggctcagggctgcagggaggcacctggtcttccctcgtcctcacgatcctgcaccctcaagatgccacgttgttgaggctgtttagggaacttgacaagctgattggaaactgtgctgaaatagagcccaggtagtgatgcggacagggcagtgccagaaggagccccagcgattcctgtgctgcaaggcacgcccaggacggggcactagccgggggaagaggctctcagggcccaggtgggaccccagcctcagactatgaggtcatgactgtgtacagctcagccaccgggctttgggactttgaatccaccttagcagggtttccaaacccattgtctccacggccaccctgccagtccagctgcagcagggcggaacaaagtggaggcctctttcttgctttctttttttttttttttgagacagagtttctctcttgttgcccaggctggagtgcaatggcaccatctcagctcaccacaaccttcacctcccgggttcaggcaattctcctgcctcagcctccctggtagctgggattacaggcatgcatcaccatgccaggctaattttgtatttttagtagagatggggtttctccatgtttgtcaggctggtctcgaactcccgacctcaggtgatccgcctgcgtcagcctcccaaagtgctgggattacaggcataagccaccgtgcccggccacagaggcctcattctgcagcgtatgctactcgggcaaaggcagctgactgcagacccaacacggtgacccagctggatggtgcctgagagacggggctgccccacatggtgccctgtcatgccgcgggacaggtcgcccagcagatggtagctatggccccagtgccatcctgggctggagacacatgggtgccagacacgttcatgcctgtcgtctggcccagctgccgtggggagccctccagggccgtgtgcctgcagggaccggcctgttcacctctaggctcacccctcgggtgctgagtcaccacagtgggtggggccgtgccccctcccaggccggcttccacagctgcccctgcagagcgcctctgtgttaagggctggccgcctccttcctcagggggtgtaacatgtaaaaagctgcaccctggcctgtacaggggctcccgcctgttatcccagccctgtgggaggctgaggcaggcagatcgcttgagctcaggagttcaagatcagcccgggcaacttggagaaaccccgtctctactaaaaatacaaaaattagttgggtgtggtggtgcgcacctgtagtcccagctacttgggaggctgagatgggaggatggcttgagcctgggagacaaaggctgcagtgaactgcgatctcgccactacactccagactgggcaacagagcgacaccgtctcaaaaaaaaaaaaaaaaaaaaggttctgggcctcgtaccttctgcgctttcatgagactcagccctggaagtcctatgtggctggtggccccagggaacaggacctgggctcctctcttctaacccatgtgggccacaggtccctgtccatctgtgctggggctcacctgggggccgagggcctcgggcatgtgggagatttgtctttgagaaaggggtggaggagtgtggagcccttggggctgcctgcaggccgtgagagacctccccagtgccgcttctgtcctgggctagggaggtgggggggcgggggaggaggagtggcagacactgaggcggtgaccacacgggcagggtgcaggtgtcgggatgacttggcaggccatggtgcagtgctctggcaggctgggcccaggccctgctgctgggcagtggtgtcatttggagggtggtccttcagggaccccctcctgcctcctgcctcgggggtgggctggggaggtcggggctaggtgggccctgcgctggcggtgctgatggtctctgtccccgcaggaaagaatctctatacaaatgaatacgtggctatcaaattggtgagtcggcccctccaccccacccccgctgacgtgccccccagggatttcagggcagcgacccggtcccctggtgactcgctcttgtgcccccaggagccgatcaagtcccgggccccgcagctgcacctggagtaccggttctacaagcagctcagcgccacaggtaccgggcggcccgcgggtggggcgggggctgcgcaggggcagggagggggctgccgccgcacgcccgtgcgtctgtcctccgccgcagagggcgtccctcaggtctactacttcggtccgtgcgggaagtacaacgccatggtgctggagctgctggggcccagcctggaggacctgttcgacctgtgcgaccggaccttcacgctcaagacggtgctgatgatcgccatccagctggtgcgcggcgggcggggcggggcggggctcggagggaagagggtggccctggaggggagcgcgtgggacggggaggggcccggccgacaccgccgtgcccccctgcagatcacgcgcatggagtatgtgcacaccaagagcctaatctaccgggacgtgaagcccgagaacttcctggtgggccgcccggggaccaagcggcagcatgccatccacatcatcgacttcgggctggccaaggagtacatcgaccccgagaccaagaagcacatcccgtaccgcgagcacaagagcctgacgggcacggcgcgctacatgagcatcaacacgcacctgggcaagggtgagctgcgcgcgcgcggcggggggcgggcgcccggaccccgctgaggctgcgcccctgtccccgcagagcagagccgccgcgacgacctggaggcgctgggccacatgttcatgtacttcctgcgcggcagcctcccctggcaggggctcaaggtgggcgaggaggccgggcaggcgggcggggacgcagggcgggagcaaggctgaccacagacccccgcaggccgacacgctcaaggagcggtaccagaagatcggggacaccaaacgcgccacgcccatcgaggtgctctgcgagaacttcccaggtaaggggtccctgcgcccccgccctgtgccccccaccccccaccccccacccccacccccgccgaggccccgctggcgctctctctgcagaggagatggccacgtacctgcgctatgtgcggcgcctggacttcttcgagaagcccgactatgactacctgcggaagctcttcaccgacctcttcgaccgcagtggcttcgtgttcgactatgagtacgactgggccgggaagcccctggtaggtgggggggtgccggtatgtgggagcgggggaccgggaaactgccctgagggagatgggaaccggcgctgcagcccatcctgacccctgctccctcacccacagccgacccccatcggcaccgtccacaccgacctgccctcccagcctcagctccgggacaaaacccagccgcacagcaaaaaccaggtgaggcccgggcgggaccgaccgccccagggaggggcatgggcggccagcgtgaccccctactgcccccaccaggcgttgaactccaccaacggggagctgaatgcggacgaccccacggccggccactccaacgccccgatcacagcgcctgcagaggtggaggtggccgatgaaaccaagtaaggctctggggcggtgccttcggggaggtgggggtgccctgggtccccatgggggtgggagggcctgaggcctgggctgcccccgccctgcaccccggtcctcctacctgagccactgccctcctcagatgctgctgtttcttcaagaggagaaagagaaaatcgctgcagcgacacaagtgaccctgggcgcgtgcagccccctgaatcttctccgtgcagccccttggggcgcgaccttgtgcgaggccctcggggcccacccacagcggcccagggccagaccctggctggaagccagaacgcagactgcaggggccgcgcctggctcaggcggccccacccccgggacgtggggtcacttccttcatgtaagactttggccgaaatttctacacctgtgtctagtcctcccctccaagagcattaactatttaaaacaaggaaaagaggaaaaaaaaaacagaggcccgccctaccccactcctgcccctccgtttctttgctgaagtgagtagtgtgatcctggaggccccccggcctggccccgccccgccagccgcccccgttagcgtcataaagtccagcttgtctccctcgatccaaaggccgttttctcgaggggagggcaggcccggcctggaggggtgctgtggagctgtcttgcccaggccctcctgggagggggacaggcattgttgccaggggtgaggccgtgccccaggcctccccgaaaccaaaggggaaggcaggggtggggccgtggctgaagccggctccccaaccaaaatgctgcaccaaagctcgggcgccgcgggcacggctgctgcagtctcttcccagcctggccctggcaaggggcgggtgggcgctgccaggcgggtgcttctcgacgcacttgctcccggaggctgcgccccggcgcctggaacccgaggtgggaggaccggttggtgtcaccctgctcggccctcagccctgccgcgtggggcgcgtgggcacggagcttcctgcctctctgctccgacacccggcaagcagccggagacaaaacgccttaaagcccccggcccagccctgcaggtatattgcaggggcctgggggcggccctggactggcgggcggttccccagtggggtgccctggaggctgccgggcagagtggagcagcttggggccgtgcccagggcggtggctgtgagtctagtttttgctttaccaagtgtacagaaatggcatttacgtttctctgatgctcccttgaagccatagaatttaggggcttttttaaaaaaataaaagaaaaatgaaaccaaacccaagtgtagagggatttgtctgggctttccacgaagcttgacctggaacgggcgttgcttccatccccatcctgcctgtccgggacgagtccggagcggctggcggcctccggtaacagaaaccgactgatgaggcggaaggtaaggaagatggaagcagagggcagagctgggctctgtctggggagagggcaggagacgagtgttcacgtaccatggaaaggggaagtcacacacatgcgacttggccccgggggtcccgttccccgacactacacaaatatacctgaaagcctcagcgacggggcccaggcaggatggtcctggctgctctgacggcggaaggcctccttgactccctctgttcacgcagcagggcagaaaacatctccacgggggccacgacactgtgaagggaatcagcagtagctcccagaagaacagcggaaactgcaggcaggtgaagaccttggcagcactagccccggctccgccccgtgccttctccccagacaacaccccatacccggcagcaagggtggaagaccagtaccaccgtaatatgttgtgacaaagcagaaataatgcacctgtaagagtcagatggcaagagggaaatggaatgagctcatcgatggttttcccggcagtagcttggggataaggactacttgtcatgtgctttatatatttacccacatgttaaccttttctgatgctcttcatt[132 bp omitted]aaccctgtctctactaaaaatacaaaaaattagccgggcgcctgtagtcctagctactggggaggctgaggcaggagaatagcgtgaacccgggaggcggagcttgcagtgagcccagatctcgccaccgcactccagcccgggcgacagaatcccaaaactacctctgggataattttcagcctgaagaacttcaatatttcttacagtgcagcttttttttttttttttttgagacagggcctggcctaggctggcgtgcagttgcacagtcatagctccctggagcctccacctcttgggctcaagcgatcctcccacctcagcctcccaagtatctgggaccatagacgtgcaccaccacactcagctaattgttttgttctgttttgtttttaggtagagatagggttgcctgtctggctctgttgtccaggcacttgcggaggacgaggtgggaaagtgaccctgggatgagaggcgtgagccaccacgccgggccgagtgcagctttgtcggtaacaaattacaaattagcatttgttccctgaaaaaaatatttatttcacctttcttaataaggatgtttttgctggtagtggcattccaggttgacaaagtgtttgtttgggacagagtctcgctgtcacccaggctggagtgcattggcgtggtctcggctcactgcagcctccacctcccgggttcaagcagttctcctgcctcagcctcccgagtagctgggattacaagcgtgtgccaccacacctggataatgtttgtatttttagtagagtcggggtttcaccatgttggccaggctggtcttgaactcctgacctcaagtgatccacccacctcggcctcccaaagtgctgggatgacaggcatgagccagcatgctccactgacaaagtttttaaaacgcggcggctcacgcctgcaatcccagcactttgggaggccgaggctggtggatcacaaggtcaggagatcgagaccatcctggccaacacggtgagaccccatctctactaaaaatacaaaaaattagccgggcgtggcggcaggcacctataggcccagctcctcgggaggctgaggcaggagaatggcgtgaacccgggaggcggagc[138 bp omitted]tcatatagcttgagtctcattctctctctctccttctgggactccacttacacatacgttcaaccctttggctgtgtcacgtatctcgatctgttctgtttttccattgtttttactcactgtgcttcaccttgcatgtttgtttgtttgttttttgagacagagtcttgctgtgttgcccaggctggagtgcagtggcgagatctcggctcactggcaagctccacctcccgggttcacgccattctcctgcctcagcctcccaagtagctgggaccacaggcacctgtcaccacacctggctaatttttgtagttttttttagtagagacggggtttcatcatgttagccaggatggtcttgatctcctgacctcgtgatctgcctgc[132 bp omitted]tgcaacctctgcctcccaggttcaagtgattctcctgcctcagcctcccaagtagctgggattacagatgcacgccaccacgcctcgctaatttttgtatttttagtggagacgggtttcgccatgttggccaggctggtctcgaactcctgacctcagatgatccacctgcctcggcctcccaaagtgctgggattgcaggcatgagccaccacgcccagcctgtcatttttaaatggatgctggacgttgtaaatgacagatggtagaagctggtgctgatgtttcttcacagggctgtgttttcttttggcagggtccagcgtaacagcagcccagtgagaccctaccagggttttgttttggagtgatgacggcttccgttctgtcctccccacaggagtgttgccctagctcctggtgggtggcccttctggtgtcttcattagaagcccaaggtgtttccttttaatatgtatttttttagagatggggtcttgctgtgttgcccaggctggtctcaaactcctggcccctagcagttctgcctcagcctgccaaagtgctgggattgcaggtgtgagccagcacgcccggcccccagggtgttcgacaaggccccctaccccgccagcctccatctccattgcctgctcccagcactgcgcactgtggagatctgctcagccttcagcctcctggcaactgtttgcggctggcttttttttttttagacggagtcttgctttctcgcccaggctggagtgcaatggcaccatcttggctcactgcaacctccatctcccaggttcaagcgattcgcctgcctcagcctcccaagtagctgggattacaggtgcctgccaccatacctggctaatttttgtgtttttagtagagatggggtttcaccatgtcggccaggttggtcctgaactcctgacctcaggtgatccacccgcccggcctcccaaggtgctgtaatgacgtgtgagccaccacgcggccttgctgccgggtttcttgatgtcttgccctgcacgtgtgctcctgaggcagcagccaacggcttgacttctctggccactgaggccacaactgggcactccctgctttctctccatctctcacatccacggtcccccagcagccagcagggcctccccacggggaaatcggcacacacgtccattgcatttgggtttggggggaggtgttgagttagttagggtcttgctcttgcccaggggggagggcagtggtgcatcactgctcactgcagtctcgacctcccgggcttcagtgtggcctgtgggtacttaaggagggtctcgcagcactggcgaccagacccggggttcagggcccctctcggcgcacgacatccctcgcccactgcagcccggatgacagggcagagagtgaaggggagcaaagcagtgtgcgctcaaggcaggtgcatttgtttctttatttaaaaaaatcatctgggggcatggtctgaggaggacacccctcccatggctttggggaggacgcaggttccaggagtcacagggcagaaacacgcggggtgggtgggggcgtggccggagtggggaggggctgtgcccccagcacctgggggtggctcccacggcaccaggtgggctagggcaacagtatgtacaggcgagcagtgctcctggacccggtcggggccggctggggccccattctgcggcaggggagctctggggcacagggtctgagtcccatcttgggctgcagggaccgcgagggccgtccagggaggctggacagcgggggcctttatctgggcccatcaggtggatgagaacggacactgcaaaccgctcaccacctgggccagggctaggcctatccggcaggggccgtccccacactgaatcctgcgtgcgcagaactcaagccggcatccaggcagtgggaacgccccgcaggctgggcttgggtggcctcgggcacgtgacaggtggggcccgtgtcctgataaacggacaggaacaaaaggaacgcaaggtctgggacccacggctctgggagcagcgccacccaggctggctcctagcagagaaatgggaatcgcaaatgcattgcaatgtgcagtgaagagacgcgagggacgcccgcggcgcaccgccggcagacgacgtgggcaggcgccctgagctgcgggtccgtgggccctggcccaggccggcacagccctgtccctagtcctgagggattgtctccacagggcctggccactggcctggccacctccccggctgccctgatccagcagccacactcgtggtgaacacagggcaaccccgtcctgatgctgagaaaggtggcatggagtggacagacggcctgggggacactgggcctggcaccgcgtggtgggggggccccagcagcagatgatggcctggggctgcggctatccccacggagggagggcggtgtcggtgtcgggcagcctaggtgtagaagatgacctcggggatctggccgtcctccacggatgtgccattgttgttcccggccgcgtagcaaaaggtgaagcaggtcttggcgcccgtggtgggcgactcgtgtgtcaccttgcgcaggcctttggtgccgtagtgggagtctgggccctgtagggaataggggtacagtgaggtcaaggaccaccaggctgggatgccccaggtgtggacagggcaaggccccgactgggccagggtggctgcctctggagagtgtgtgctgtgccccggtggcttcaggatgggccagagactcccacggagggacccctgtccccggcggcgcaccttgagcgtggcacaggccgtgtagttgacgttgggcagcacctccaccggctccttgaacatgacgcggaaggtgctggctgagccgtcgcagctgaagcccgtgtcgttctggcccaagacggtgttgctatcggtgtgaataatctgcggggaggtgggaagtgggaggctcaggcctggggagggccaacggggacccctcgaggcccagcccacctgcccagggtgggggcagcacagggaccagggccgggggttcagccagggttccatggaggtggagagaggacatgggcctgagtggggcctggggatgaggcttggggctggtacctggatgttcacttggtagtcggtgggcccgtggatggatccatacagcccaaatcccaccacgaagatgcgcttgttgactgagaacctgccgtggcagatgacaggcagcagcgtggatacccagggatagcctaaggtgagctggggcgagcccacccccatgcccggtcccctccatcgtccctgagtcctccacccccatgcccggcggcccccccgccgtcttcatcatccctgagttctccacccccatgcccggccccccatctccgtcatccccgagtcctccacccccatgtccggacccccccgcctgcaccccaagccccacctgatgcggtcactggtcccgctgtagccccagcgactctccacctgctggaagcggttgatgctgcactccttcccacgcaggcagcagcggggccggtcaatgaactccactcgtggcttggggttgacggtgaagtgcaggaagaggctgaccacctcgcggtccaccaggatgcccgactgtgcgggacctgcagcacagggagggtgtgggggagggccgggctgcaccccaggatcccgagtgcctgggaggacacgctccttccccctaagatgtctgcgtcggactttcaaggtgcagggacctgggcagcccctccccgggggactagccaccagccatggcccctgctgcctgggcttttagggagaggtcccagggcacagaccagaggccgacagatacgctcactcaggggcgatgcctcagggtctgacagatgcactcactcaggggtgatgtctcagggtctggccccactgtagggaccacccgtcacttcactgtgggtgggggcggggggctccactgcctgttctctcagggccattggctgggaggggtcactgtggctccctgctaggcctgtaccccccaggctgcagccctggcttctagaagcagtctgggggttcctctccacggtgggccctaggcagacaccttctcaagcgcttacacccccaggggtgatggctagcggaccccaggcagactccaagagccaggctcttaatcccggtgcagagatgtcacaggcagagggactgtgcatgggatgtgaaggggctctgggtagggaggggaggccaggaggggcagaattgggggtccaccatccacccccaggagtgccaggacacagcaccctctgctctaatgagagcagccctgcctgcctgagacctaatcactcatcaaccaaggtgggctcaactccgcatcgctcagctgcaagccagcccagtgcagacacagtttaataactggtgagaaacagaccattatgggttaagtgaatcaggaagactgagtatcaaaactcaataaacaatgttaacaattttttttttttttgagacggagtttcgctcttgtcccccaggctagagtgcaggacggagtttcgctcttgtcccccaggctagagtgcagtggcgtaatctcggctcaccgcaacatccgtctccagggttcaagcaattctcctgcctcagcctccagcatagctgggtttacaggcatgcgccaccatgcccagctaatcttgtatttttagtagagacggggtttcaccctgttggtcaggctggtctcaaactcctgacctcaagtgattccccccatcttgggcctcccaaagtgctgggattacaggagtgagtgacccagcctggccaacaattgtatatatttttttattttaaatggagtttcactcttgttgcccaggctggagtgcagtggcgcgatctcggctcatcacaacctccacctcctgggttcaagtgattctcctgcctcagcctcccgggtagctgggattacaggcatgagccaccacacccagctgatcaacagttgtatttttaagaagtatgtatctagccaggctcggtggcccatgtccataatcccagcactttgtgaggccgagatgggaggatggctggagcccagttcatgaccagcccaggtgacatagcaagaccctgtccccacaaaaaaatacaaatataagccttgtgtggtggtggcacctgtgatcccagctactccggagtctgaagcaggaggatcacttgagcccaggaggtcgaggctgcagtgagctgtgattgtaccaccgcactcagcctgggcgacagagaccctcttgctaaatctggcgaccttcagctaagcaagagcgggggccgcgtggacctggggaaggccagacggcgagtgtgcaccagccccagggctctgtcccagccccttctggaaagttccaggcctgttttgctccagagctggatggcgtcaggcagtgagcagccacgagggcaggaggcatcgttagcgctgccccttcacgtcaccctggaacccaggccctgcagcaggggaccccaaggcccactcgggcgcatgacagccaccccggccatgtcagagccctcctgagctcgtcacagacactggtacctgcaccagcaggtagcacaagggcgcgagacggggactcccttccctcctgggaagatgccaccaaaacagctggacagacacgagaggcggggtctggcagtgtgcacggtggggacagagccgggccggggctaacagatggccctgtggacgcgtcctcacaagccaggtttcttcctatctgtatatgccaggcatctgccaggctttccgcagtgaactcgggggcactatcctcggtacccagatgcccacctgtgtgccactcccctcccaaaccagcccctgagcccgagctctgttacctgcagcgaactcctcgatggtcatgagcgggaagcgaatgaggcccagggccttgcccagaaccttccgcctgttctctggcgtcacctgcagctgctgccgctgacactcggcctcggaccagcggacaacggcattgaacagccgcacctcacggatgcccagtgtgtcgcgctccaggacagccaccagcgtgtctgtggggtggaggaaggggctgcgtgaacacgacacccacatgcccaccctgcaggaggcagtgagactaacgtgaggaccagcagttaaagccgggctggcaactatggcccgtggcccaaatctggccctgtgagtgtgtttataaataaagctttatcaacacaagaccacgccccttcattttcctcggctgtggttgtttttaagccacaaggacagacttgagtagctttgacaaaagctgttcaacagcaaagtcaaagccatggaccatcggaggacgagatggtcaccatcagctgggatggtgggctctggcctgtggcctcctggccaaggccccggactcccgtggggctgtgctaggacccaaactcctgacctgctgcaagtggtgaggccccagctcacctgtgcaactcccccaggcccaaagctcccactgtcaatccccggaccctcccgccgaggccccgctgggattcccacacctgggctcctgggcccttacccaggtcaatgtcggtgaagccctccgcggtgatggcgtctgcagtgtttttgtcgatgttctccaggcacaggctggccagctgcggttcatcgaagagtcgcgcctggcaagagacatcgacggggggcgcggtggggacatcagcacccagccctcggcagatccccagtgcggggccggttcaaatgcagccctgaccacacgggccttcctgagcgtggccaggagccaccagggtctcagccaccaggccggccctgttgtgggcccagagactcccctgtgaccgctgactggggcgggagagttggggagttccctctcaggacctcagaggccaaggaaggaagaaaaagatgctcaggtccctgtcggcagggcctgctgctttaggcaaaaggggcgttgcagctgcactcggggggcagcagggcccaggaccccgagtggcaggcagaggtgaggtggccggggccgaccggtgaagcttcccgaccacaacatgcccttggccacttgtggtgggaggggccgtgtccccggcagctccatcccaagacaaacagcagacatgacttctgacagtcaggtgacagagctggaggacgcctgtgctcttagggaaacagaggcttagttagtggaaggtgctggaagggcctatgccagcagggacccgggcaggcctttctgcgggcatcctcccgaggacacctctcaagtgggttcgtagtggttttaggggcagggaggctgaggcagccacaagatgaagcccggggagtgagctccagcctcctctcagctcaggcagaggcctctccagcaaggcgaccagatgacccggacaagaaacccctccctgtgggagtccgggatgccctgcatctgacctgccaggatggagggggagaaggttctgggtcctttccaggatgccggacccccaaagcccattggaggacccagtgccgctgtcccctctggccaccctccacccccgaccaggagctcacggctcccaagcggccgtccacccgtactggccccacgtcctctcagcctccctggcctgcacgacctccccagcccccgccctttgggctgcacagagcccaactggggtcccctgagatccctggccctgctctgtctacctgacatttccttagagagagagagaaagttctctctggtttttttttttctttttttttagccaggcgcggtggtgggggcctgtaatcccagctactgtggaggctgaggcaggagaatcgcttgaacgctggaggcggaggttgcagtgagctgagatcgtgccattgcactccagcctgggcaacaagagaaaccccgtctcaaaaaaaaattattttactttttttttagagacagggtctcactctgtcactcaggctggagtgcagtggcgccatctccactcactgcagcctcaacctcccgggctcaggcaatcttcctgctttggtcccccaagtagttgagattccagacatgcaccagcgtgcttggctaatttatgaaatatttttttttagtagagatgaggtttcaccatgttggccaggctggtctcaaactcctgacctctggtgatctgcctgtctcagcctcccaaaatgctgggattacaggcatgaaccacagtgcccggcctgaatctttttttaattttttgtagaaacggggtctctctatgttgcctaggctggtctagaactccgggcctcaagcaatcctccctacttggcctcccaaagtgctggggttacaggcgtgagccaccgcaccctgccaataattttttgaagtatcacggaaaagtccaaaacacatctttttttttcaggtggagtctcgctctgtcatgcacgctggagtgcagtggtgcgatctcggctcactgcaacctccacctcccaggttcatgcaattctcctgcctcagcctcccaagtagctggaattacaggtgcccgccaccacgcccggctcttttttgtgtttttagtagagataggatttcgccatgttggccaggctggtctggaacgcctgagctcaggtgatctgcccgcctcggcctcccaaagtgccgggattacaggcgtgagcaaccacgcccggcccaaaacacattttactaccaggcaggagcctgctgcctcccgggcccgcccccggccccgcctccgcctccagcctcggtccgccccaccccggccccgcctccagccaggcctggccccgcccccgcctcgtaccggccccgcccacctgcgtgagcagcatgaaggcgttgtcggctcgcaggttcttcttcaggaactccacgcaatgggcctcgagcgctggcaccgcgtacttcttggcggtgtatagcgtggtcatcaccgtctccgggccaatctgcacctcgtccgagtagagaaacctgcagaagcaacgcgggtggccgtgaggtgggaccgccatgcccgcccccaggggagagcgtcaggggaccactcagaccgttagactcggccaccggcccttgagctggcaggacccaaacacccacatcaggttccccgaggaaccttccagaattagcccctgtccgttgccctctgacatagggacacgacttggcaaggtggtcacccatgaaaacgagcaagaggctgaacccatctacacagcacacacccggaagcgtctatatggcctgtcttgttctgcccgggatgccccaggagagggcactgggagctgggtgtctccttcttgggcaccttttccatgaggaactgttggttccccacctcgggcaccaccgaaaacctcaaccacttctgggtggatcatagaacccaacacgctaattaggatcatggataatcatggacgctattaccacctgccagcgaggggcccacacgacactgaatacagatcagaagttgggccgatcaaaaatagaagcacaggctgggcctggtggttcacgcctgtaaccccagcactttgggaggctga[134 bp omitted]gaggcaagagaatcgcttgaacctgggaggcagatgttgcagtgagctgagatctcgccactgcactccagcctggagacagagcgagaatccgtctcaaaaaaaaaaaaaaaaaaaaaaaaaaaaaaaagcagcacaggccggcctggtggttcacgcctgtaatcccagcactttgagaggccgaggcgggcagatcacttgaggccaggagttagagactagcctggccgacatggcaaaatccccctctactaaaaatacaaaaattagccaggtgtggtggcagacacctgtaatcccagctacctgggaggctgaggcacaagaatcgcttgaacccaggaggcggaggttgcagtgagccaagatcgtatcactgcactgcagcctgggagacagagtgagactccctctcaaaaaaaaaataaaaaataaaaaaatgtctccagcctggagcagtggctcacatctgtaatcccagcacgttgggaggcagaggcgagaggattgcctgagaccaggagttggaaaccagtgtgggcatggtgagatcctgtctctaaacacatttttttttcagctgggcacagtggctcaggcctgtaatcccagcactttgggaggctgaggcaggcggatcatgagatcaggagatcgagaccatcctggccaacatgatgaaaccgggtctctactaaaaatacaaaaattagccaggcgtggtggcgtgtgcctgtagtcccaggtactcaggaggctgatgcaggagaatcacttgaacccgggaggcagaggttgcagtgagccaggatcgtgccactgcactccagccatggtggcagagcgctactccatctcaaaaaatgaaaaaataaaaaaatattttttttctctcccagcctgtgggtggcatttccactctgccggtattgtcctttgaggtatacatttttaacattttccctaagtccaatgtctttgtttattcttttcttggctgtgtctttggtgtcatatccaagtaatcatggtcaaacccaatgtcatgaagatttgattctggtttttctttttttgttgttgttgagacagagtctcgctctgtcgcccaagctggagtgcagtggcgcagtcttggtttactaaaacctctgcctcccaggttcaagcgattctcctgcctcagcttcctgagtagctggggttacaggtgcctgctaccatgcccagctaatttttgtatgtttgtagagatggggttttgccttgttgcccaggctggtctccaactcctgacctcaggtgatccacccacctcagcctcccaaagtgctgggattacaggtgtgagccaccgcgcctagccatactttggattcttttttttttttttttttttgagagggagtcttgctctgttgcccaagctggagtgcagtggcatgacctcagctcactgcaagctctgccacctgggttcacaccattctcctgcctc[349 bp omitted]tgcctcagcctcccaagtagctgcgactacgggcgtccgccaccatgcccggctaattttcttattttttatttattttttctatttttaatagagacgaggtttcaccatgttagccagcatggtctcaatctcctgatctcgtgatccgcccatctcagcctcccaaagtactgggattacaggcgtgagccaccgtgcccagcctggactttgatctatttgagttaatttttatatacagtaaggtaagggtctaacttcattcttctgcatgtgtatttctagttgtgcctgtgctatttgttaaactctcttttctgttgaatggccttggcacccttgcaaaaaattatttaaccctatgtgcaaaggtatttatttctgagctctctgttccattccattggtccccacgttctgtccttacgccagtaccacactgttttgatgattgtagctttgcagtgagttttgaaatcagaaagtatgagccctccaactttgttctttttcaagatcgttgtggctattcagggtcccttgggattccatatgaattctaggatagtttttctatttttgcaaaaaacagtaattctgataggattatactgactgcagatcgcagtgggttgtgtggacatcttaacaatattctcttcaatccatggacatgggatgtgtttccatttattgtgtctttttaaatttctttcactgatgtttccttttttttgttgttgttgttattttttgtttgtgtactccagcttgggcaacaggagcaaaactgtcaaaaaaaaaaaaaaaaagaaggaaagaaaagaaaagaaaaagaaaagcagggaactggctggacacagtggctcatgcctgtaatcccagcactttgggaggctgaggcaggcggatcacctgaggccaggagtctgagaccagcctggccaacatagagaaacgctgtctctactgaaaaacacacaaatgagctgggtgtggtggtgaacacctgtaatcccaggtactcaggagaatcacttgaaccaggaagtcggaggtctcaatgagctgagatcacaccactgcactccatcctgggcaacagagcaagaccacgtctaaaaaatataaaataaaaagggtgcctctgggctgggcgcggtggctcaggcttgtaatcccagcactttgggaggctgaggtgggtggatcatgatgtcagatcgagaccatcctgactaacacagtgaaaccccatctctactaaaaatacaaaaaaattagccgggcgtggtggcacgagcctgtagtcccagctacttaggaggttgaggcaggaaaatcacttgaacctggaagactgaggttgcagtgagccaagatcacggcactgcactccagcctgggcaacagagcgagactccatctcaaaaagaaaaaaaaaagtgcctctggaacccctcattgcacaggaacgttctagaaatctccaccaagccagggcctctgagctggtgtcagacagggtctacgttctctgaggtccccctccccaggcccagctccccagcaggaagcatccggaagcattacttgagcagtgcgaggaaggcagcgggttccacgtcgggcagctcaatctccgtggatgttgtggccattcccccgttgaacatggcatcaaagacggcgctgcccacggccagcacgaacctggtacgggagagagaaggccctggttaagcccgtggccgccaccccacggccgggagggccagcccggtatcctgggtgaccaccccactagggctccctgccagcctccagcaggcatgtaccaggccccccgatggcagaggcttctggaaggggcctgggacagcaggagggtgatgcagacggacccacggcaaggacaggcagggctaggaccatgccctgggccacacagggcctcacgctctgccagccctcaccatcctctctctttccttccaggcgtcaggcacgcactcattcactcattcccatatgcatgcatttattcacacgtgttcattcacacatgcattcacacatacgttcattcatgcatgcattcactcgctcattcacatgcattcattcacacaggcgttcattcactcattcattcacatattcattcattaactaatttccatgtacattcactcaactcatacacatgcactcattcattcatccacacatgcattcattgatccactgattcattcccgtgggcatgcattcacttgctcatttatgacacatgcattcattcactttctcattcatcgcacactcattcactcacccattcacacacacacacattcgttcattcccacatgcactcatccacttagtctcattattcactcattcattcacactcgtctactctctatcactctcctgctcacgcattccctcatcagcacaagctttcccagggagtcagctacaggcacagggcctggcctcactgagggagacagacgaggaccaaatggccgaacagcccccactgagtgagagaagagagaggagcgtggtcccatcaggaacgcaaggcccagggaagccctgtggggtcatctgagccgccacgtccatggggaagggcatggaggcccaggaacagcaggagcgtgggaggagcgttaggaggcagcaggggtggccccagctgggaaagcggtggctgtgaggacgctgggggttctgccccgtgtgaagctcaggctgcctatggggcccactcagtggctcagatcttcgatatcgccacaggcaggagggtgcggtgagcagagaaaggctgctggtgcctccccaagagccggctatgaacccgcgtttggccaggtctgtatggggtggggagaactccacggctcccaggctcaagacgccactctgtgctgtccatgtacagtccccagggcctgcccacacgatggcctcccagggggctgagagcacacacagcataggggggtcacagacactcagcaggggcacagacgctggtggggcgggttcacagacgctcgcgaagtgggatcacagacgctcggcctgcgcgcggcggagcacctgccccaggacgttgcggtccctgcgtcacctcttccccacctgtccccttccaagtctcccaccacagcaagtgccggctctcaacagcctccccacgcccggaaagctccggagctacaggtggttccgcacggatgggacctgcttctcactcctgcacagctgaacctccaggactggctgggcgacctccacacagctcccgggaaagcccccgtcttccgaggagaagctcctcgctctcctcccaccacacgcgcccccctaaaccccgcaggccctcagcccacccggtccagcccagggcttgactgcaccccagagtcaggtcagaaaccaacgcagtggcttccacatgggccccgaccacagcttccacatccgccccgaacctcggaatgcgaggcccggcggaaacaggccggtgctaactccgtgagtcaggacgaaggcgccggggaaggctggccctaaacagtggctggtgtttttggaaggaggagaaacaggccgggcacggtggcccacacccgtcatcccagcatgtgggagaccaaggcgggaggatcgcttgagcccaggagtttgagaccagcctgggcaacatagtgagaccccatctctacaaaaacattgaaaattagccaggcatcgtggtgagcaagtgcaatcctagcgactcaggaggctgaggcaggaggactgcttaagcccaggaggtcaaggcttcagagagccaggactgcgccactgcactccagcctgggcaacagagcaagactctgtctcaaaaaaaaaaaaaggccaggtgcagtggctcacgcctgtaatcccaccactttgggaggccaa[134 bp omitted]gaggcaggagaattgcttgaacccgggaggcggaggtttcagtgagccaagatcacgccattgcactcctgcttgggtgacagagcaagactaaagactccacctcaaaaaaaaaaaaaaaaagaaaaagaaaaaagaaacagagtgggcggccgcatgaagcagggactggagcgatgcggccacaggccaaggacgtctggagtccccagaagctgggtggggcaggaggatcctcccttgagcctccagagggagcgccgccctcggacgccttgatccatggtcctgggctccgggactggcagaggatgaacccactgagtttgacccccccagtgtgtgggcattgggactgccgcccgcccgtctgccctcctggccgcgtcctcaagggcccaggcctcagggccctgcgccatcacccacagctggtgccccaggacaaacgctcccctcccacacgatgttccagaaatagagtacctgtgcgtgggacttctctttcttgatttaaaaatgtatcttggtctcctgtggggaaaacctttgaggagggttcaaaagcagaaagcaggaggcactcaagtgggcccggcgtgggccgtccatgcagtttggaatcagggagcacctctgacatgggcgggtccccaggcagctctgccggtccccaaggcaggggctcctccaacaccgagcccctccctggagacacctgcatgggccttcaggattcgacccctgggcaccgctactgcctcctctgcccaccgtgagtccccagccccactcccggctgttccccccttcatgtatctgtaaccccttccccttccaaacaaatcgagaacacacggccacacaaaaacacatccacaattgctcacagcagcacgattcccaactccgaacgggggaaacaaccagcgtccattgacagacacggtgcgaccacccacgcactggaacacgacccagccacaaacaggaacgaggctctgatgcaggacccggtgcagatgcgccttgaagacgtcgtgctctatgacagacgccaggcacagaaggacaaatcctgtgtgatccactcctaggaggtccccagagtcctcagattcagagacagaaaggatgggggacgggcacagtggctcacgcctgtactcccagcactttgggaggctgaggcgggcggctcacctaagatcaggagttcgagaccagcctggccaacatggtgaaaccctgtctctatgaaaaatacaaaaattagccaggtgtggtggtggacacctgtagtcccagctactcaggaggctgaggcaggagaatcacttagaacccaggaggcaccgggcacggtggctcacacctgtaatcccagcactttggggggc[132 bp omitted]ggcaggagaattgcttgaaccctggaggcggaggtcgcagtgagctgagatcgtaccactgcactgcaccctgggctacaagcctgagactccatctcaaaaagaaaagaaaacaggttaaagaccgaaagaattgtgtggtgcacaaagggccaatgattccgtgatgtaatctacgcaatgcaacgtccatgaagagccttaaaccacagggctgaacctccaagctggtgactttatccacgtgccacgagggtggccgtcccgagcccacaggacacaggtgcaggtgctccgataccctctggacatgtgaacctcttcatctggctgcaagatgtccttgctgtttttgtgttttgagacggagtctcgctctgccgcccaggctggagtgcagtggcgcaatcttggctcactgcaacctccgcctcccgagttccagtgagcctcctacttcagcctcccgagtagctgggactacaagcatagcaccaccatgcctggctaatttgtgtatttttttagtagagatggggtttcaccatgttggccagggtggcctcgaactcctgacgtcagatgatccgcccgcctccgtctcccaaagtgctgggattacaggtgtgagcccccacgcctggaagagatgtcctttattaaatctttcatttatttttatttcatttttatttttagtttttacaggtgtggtctcactctgtcacccaggctgaagtgcagtggcacgatcatagctcactgcagcctcaacctcctggactcaagcaatgatcccacctcagcctcccggtagctgggaacacacacacaagccacaatgcccagctaactgttaaatgttttgtacagacggggtctcgctatgttgcccaggctggtctcaaacccctgggctcaagcgatcctcccagttcagctgcccaaagcgctgtgattacaggcaaactgataactgtatttctcgaagttctgtaagctgttatggctaattatcaagctcaaggacggagatgtgggactcctgattttagtcagagagaagtgtgggtcacctggggactcgcccctgcaacaggcatctgacgtgggtggcacggggctcagctgaccacctgtggggtctgtgctcactctggatggtgggtgtgagggttgagttaaattgtaggatgccgccgggcacaggg[131 bp omitted]cgtggtggtgggcgcctgtagtcccagctactcgggaggctgaggcaagagaatggtgtgaacccaggaggcggagcttgcagtgagctgagattgcgccacggcactccagcctgggcgacagagtgagactccgtctcaaaaaaaaaaaaaaaaaagaaaaaaaaattgtagtatgcccagtttgtatctacaagatgaggaatcacttgctgtggaaaacccacacacagtgccagaactcctatgaggagtaaaaacagattttcctttatatccaaacagaaaccatgagagctggagtggctacgtcaacatcaaaagaaagacgccactttgggaggccaaggcaggaggatcgttttagcccaagagctgaagatcagcctgagcaatgtagcaagactccgccttgcctacttttct[132 bp omitted]aaccccgtctctgctaaaaaagtacaaaaattagccaggcatggtggcgtgcacctgtaatcccagctactcgggaggctgaagcaagagacttgcttgaacccaggaggtggaggtcgcagtgagccaagattgcatcactg[138 bp omitted]ctaaccaacatggagaaatcccgtctctactaaaaatacaaaattagccgggtgtggtgatgcatgcctgtaatcccagctattcgggaggctgaggcaggagaagaatcgcttgaacccgggaggcggaggttgtgatgagccgagatcacgccattgcactccagcctgggcaacaaaaacgaaactccgtcaaagaaaaaaaaaaaaaagagaaagaaaagaaaagaaaagaaaaaggaatctctggaccccaaaatcactactccaaagggaaaaatcaagctggaaccgcttagggcaaaccagccttctgttctattccttaaaaagacagctaccaagataaaaaagctacatacctccctcccaatctgtccacaaggaaattccttgcagacaaaggacagagagaactcagccatccctccgctcaccgagataaatgcgtatctgattgctgcctttggaaaggctcatcagaaactcaatgcaatggtctgtttcttacctatgacctggaagcccctcccagctaagagtttcccccctttctggactgaaccaatgttcattttacatatattgattgatgtctcatgtcccctaacatgtataaaaccaacctgtgccccacccaccctgggaacataccgtcaggacctcctgaggctgtgtcacaggcacacatccttaatgttggcaaaacaaacttttttttttttttttttgagatggagtttcactagtgttgcctaggctggagtgcaatggcatgatctcagctcaccacaaaatcacaaaatctgcctcccgggtgcaagcaattctcctgcttcagcctcccgagtagctgggattacaggcatgcatcaccacgcccagctaattctgcatttttagtagagacggggtttctccatgttgttcag[131 bp omitted]tattcagggttcacataacaaaccttcatatataccccctgagtcgaaaataaaatcaggccaggagcagtggctcatgcctgtaatcccaggacttcgagaggccaaggcaggaggatcacttgagcccaggagtttgagaccagcctcggcaacatagaaagaccccatctctacaaaaaaaaaattattatttttttttagatggagtcttgctctgtcacccaggctggagtgcagtggtgccatctcggttcactgcaacccgtctcccaagttcaagcgattctcctgcctc[222 bp omitted]accgcggtttgtttctgcactcactggctggtctgcgggttttccggttttgagctactgtgaatcatgctgctctgggcattcacgcacgaggctgtgtgaggacacagattctccttctcctggataaatgcctcggagtggaatgaccctgacgtttaacattttcttttttgaggcagggtctcactctgtcacccaggctggagtgcagtgctatgatcacagctcactgcagccttgacttcctgggctcaagtgatcctctcacctcagcctcctgagtatccgggactagggcgtgcaccaccatgcctg[137 bp omitted]tctcctaaaaatacaaaacgtagtcaggtgcagtggccggagcctgtaatcccagctactaaggaggctgagacaggagaatcgcttgaacctgggaggcagaggttgcagtgaaccaagatcacaccatcgcgctccagcctgggaacaagagcaaaactccgtctcaaaaaaaaaaaaaaaaattattttttagccaaagcagtggctcacacctgtaatcccagtgctttgggaggccaagttgggaggatcacctgaacccacaagttcaagaccagcctgagcaacacagcagaccccatctctactaaacagaaaaaaatcagccgagcatagtggtgcatgtctatagtcccagctacttgggaggctaaggtgggaggactgtttgagcccagaagctggaggctgcagtgagctatgatcgagccactgaactccagtgtgggtgacagagtgagaccctgtctctaaaaaaaaaaaaaaaaatttaatttttaaaaagtctaagagtccaaggggtcaatactagacacacatggctatttaaatctatatccaaattcagctgaattcaacattcaactcctcggtcacactgtccacatctgtagtccgtactggcacatgagtgcctagtattggacagcacacatccaaaccatcccgcttactacaggatactctactgcagagcacaagaccacagaaaaactgttaaacctaataaggcttcaggaagaaacagttcaaaccagataaaagtaaacatgccagctactcgggaggctgaggca[137 bp omitted]ttagaaagaccaatctcctcagtaaattcctttatcacttgacaaactgattctcaagatcatcaggcaccgttagcccagggctggcaaactatggcccttagagtgaatctggcccaccacttgtttttgtaaattaagttttttttttttctgagacggagtttcactcttgttgaccaggctggcctgcactggcactacctcagctcactgcaacctcctcctcccagattcaagcgattctcctgcctcagcctcctacgtagctgggattacaggtgctcaccaccatgcccagctaatttttttattttttatttttttgagacggtctcactctatcgcccaggctggagtgcagtgacgcgatctcggctcgctgcaacctctgctgcccaggttcaagcaattctcctgcctcagcctcccaagcagctgggattacaggcgctcgccaccacgcccggctaatttttgtatatttagtagagatggggtt[142 bp omitted]tggccaggctggtcttgaactcctgacctgaggtgatactcctgcctcggcctccgaaagtgccaggattacaggtgtaatccactgcacctggccaataaagttttattagaacacagctcttcttgctcagttacatgttgttgatttatggctttttgtgctgctacggcagaattaagtagctgcaactgagacagtatggcctgccaaaaatatttactatctgacccttcacatgaatttgctggcacctgtgtcttttatctgttttggttttgttttacacacagtcaaggtctcactatgttgcccacactggtaccaaactcttggcttcaaaagatcttcccgccttaggccagggacggtagctcacacctgtaatcccagtactttgggaggccggggatagcctgaggtcaggagtttgagaccagcccggccaaaatggcgaaaccccgtctctaaaaatacaaaaattagccgggtgtggtggtgcacacctgtaatcccagccactcgggaggctgaggcaagagaactgccgggaacccaggaggcagagctttgcagcgagccaagatcatgccactgcacttcagcctgggcaacagagcgagactctgtctcaaaaaataataaaacaaaacacagaatataagttccataaggaaggagatgtttttctgtcatatgcacctcctgtagccaggactgtatttcagtgagtatctgtagggtggacagatgggtggatgtgggtgactgattctagaagagtaataaatgtgtcagaccagctgagaaagtctttttttttttttgagacagaattttactctttttgcccaggctggagtgcagcagcacgatctcagctcactgcaacctccacctcccaggttcaagcaattctcctgcctcaacctcccgagtagctgggattacaggcacctgccaccacgcctggctaattttgtatttttagtagagacaaggtttcactatgtttgccaggctgctctcaaactcctgacctcaggtgatccgcctgcctcagcctcccaaagtgctgggattacaggggtgagccactgcgcccactctttttttttttttctaggtggagtctcgctgtgttgcccaagctggagcccagtcgtgcgatctcagatcaccacaacctctgccacccaggtttaagcggttctcctgcctcagcctctcaagcagcaggtgcaagccaccatgcctgggtactttttgtatttttaatacagacagagtttcactatgttggccaagttgatctcgaactcctgacctcaggtgatctgcccgccttggcctcccaaaatgctgggattacaggcgtgagccactgtgcccagctttttttttttttttttttagggacagagtctcactctatcgcccaggatggagtgcagtggtaggatcatggctcactgcagcggcaacctcccaggctcaggtgatcctcctacccgagcctcctgagtagcagggaccacaggcacacaccaccatgtccaagtaatgaggtctcgctatattggccagactggtctcgaactcctggggtcaagtgatcctcccacctcagcctcccaaagtgctgggattacagatgtgagccactgcactcagcctgaaaagtcttcacaaagaataaagttgggaagaatttggtgagcagttctcaaaacataccacaaagcagcaatcatcaaacaatgtgttatgggaacaaggactcacaaagcagtcaatgaaatgtgagaccccagaacacactgttcttttttttttttttccaagacagagtctcgctttgtcacccaggctgaagtgcagtggcacaatcctggctcactgcaacctccgcctcccaggttcaaacgattatcctgcctcagcctccccagtagctggggttacaggcgctcgccaccacgcccggctaatttttgtggtttttcttttttcttcttttttgaggcggagtctcagtctgtcacccaggttggagtgtggtggcgtgatcttggctcactgcaacctccgcctcccgggttcaagcaattctcctgcctc[222 bp omitted]tccatgatagagtgaataaagatacgttaggctgggcgcggtggctcacacctggaatcccagcactttgggaggccgaggtgggtggatcacctgagctcaggagttcaccatcaccctgggcaacatgacggaaatactgtctctactaaaaatacaaaaattagctgggcgtggtggcgcacacctgtaatcccagctactcagaaggctgagacaggagaattgcttgagccagggagctgaaggctgcagcatgcggagatcacgccactgtaccccag[152 bp omitted]tgaaaccccgtctctactaaaaaatacaattagccaagtgtggtggcgggtgcctgtagtcccagctactcgggaggctgaggcaggagaatggcatgaacctgggaggcggagcttgcagtgagcggagatcgcgccactggactccagcctgggcaacagagcgagactccgtctcaaaaaaaagaaaaaggtattttagatactaacttcatgggaccagccaatgtgcacatctacaaaagtgcaaccctggagatcttcagttctcccttcaagccccatgagagaatcagatgtttaattcccacagatcattcaatgcacaatcactgcgtgcctactgtgtgccaggctccagcgcgctgagatggacgggtgcccatccaggaccggggaacagcccagaagccgcgtgcaacccctggcctcctccccagcacaaacgccgacccctgcgcgacggtccagacactggggccaccaccaaggcctgctcccagcctcctctctgccatgtctcagctcaccctgcacccccgccagggaccaggcccaagcccaggccacttgctctcctcacagctggcaaggcccggcccctctctgctcatcggtgaactccagactttatcccagcacccccagttcgtcccgacatccccccaccttttttttttttttgagacggagtctcgccctgtcacccaggctggagtgcagtggcgcaatcttggctcactgcaatttctgccttccggattcaagccatcctcctgcctcagactctgagtagctgggattacaggtgcgtgccaccgcgcccagcttatttgtgtatttttagtagagacggggttttgccacgatggccaggctggtctcaaacccctgacctcagatgtctgcccatctcggcctcccgaagtgctgggatgataggcgtgagccactgcgcccggcctcagctgctgttttctttctctctgctgtgtggcctgtggctgtcagcaacccatcgggtccgtttgttcccacagccccaggacagatgtgtctgagtgaccttgtttcaatcatggaaactgaggcacagagcacttgggacacactgctctgcggacctctcagccccaggtcccgccaacacatccaagccagtacttgtccctcctgagcctgtcctggcttgtgatgctccagccagaagtctggggacccccaccacagccccccacgccctcacctgccaagctgcctcctctcctggccacaggaactcgcttcctccaaagaggacctgcatcctctacccctcatttctgccgtccccaccgagcccgctgctgtctcctgcctggagtctgcagctgctactccccagcctcgctcctgggcccatccacggcgcgttccaccctcaatgcggatctggtcacactgggccacagggcctccctcactcctcctgctccggccttgccatggctcccacctgcccagcccctctgggctctgggccttccatccctgagcctggggcactgcactctccatcaacatcacttgctcagggggtcgttctggaccaggtcagtgccccctctccattttcaaccctcctgaaatgctaaggaaacacagatgacctttcaacaaggcaggcttcaactgcacaggtccactcatatgtgaattttttcaataaaggctgccccaacggtgccggcctctcctgcctccccttccacctctgccaccccggagacagacccaccctcctgctcctgctcctcagccctcaatatgaacacaaggacacaggccttcatcgtggccacctccactgtgtgaacagcaaacaggatttctccttttattttttttccttttttttttgagacagagtcttgctctgtcgcccaggctggagtgcagtagcgcaacctcggctcactgcaacctccgcctcccgggttcaagtgattctcctgcctcagcctcccaagtagctgggactacagttgtgcaccaccacacccggctaattttttgtatttttagtagagacggt[148 bp omitted]gggctggagtgcaatggcgcaatctcggttccctgcaacctccacctcctgggttcacgagattctcctgcctcagcctcctgagtagctgggattacaggtgtgcgccaccacgcccggctaatttttgtatttttgtagagacagggtttcaccgtgttgaccaggctggtctcgatctcccgacctcgtgatctgcccgcctcggcctcccaaagtgctgggattccaggcgtgcgcccccgcacccggccccttagacttttctgaatgtattttctgttctccagcctgttattgtgagaacaggaggctggtgtgcattgaccaagtgtcctcacaaggcctccggtcagcgagaagccattcctagttaagttcgtgggagtcaaaagttgtacttggatttgagctgagtgggggtccacgcccctaaccccgcatgtcgagggtccgctgtcccaggcccgcccaccttaccttgctgctatctcccgctgggcctcattgccctctcctgagccccccgggggcagacccctcacctacttttctccaaggggtccttgtcctgcctccatcttccccactttgcaaccgagccagcggtccctcaagtgcaatcgcatacatgtcccaaggtcagccggtgcccggggcgccccacctcccccctcaaacagaaagcctgggattctccagctgcacctgctgctgggtgagttccagctgcatccaacctaccccctccccaaagagcacaaagaccacccaggtggagggagcaaacccaccgcccctcactccaagctaggagaggcccagcagctaaggacgacagagacagggacggcgacacggacggcacaagccgtaggaggccccggaaccctccaggggcaggaacctctgctaagtaccgcccagggcaggaccccacgaaaggagacccagctgcccataaacacccaggaagaagccagaacacgttaacaaaagcacccgaaggtcagaagggagggcaggaccctccccctccagtgcccgcagcaagaaaacccagcccctgcccccgaccaatgaggggcagggtaagagggaccggggagtggagggaacctggggcctggggccggtaccccgcacactggcaaagacagatactgggccaaacccacttctttcccagaaaggagggctgggggctggggagggagggaccccggagctgggggtctctgggttggaagggcccggagatgggagtctgggcaggggtctagggtggtggcctggtggcaggggatcataggatggggtgcagggggtagcagggcccaggggagacaaccttctgcagagtccagggtccagagcctggcagtggcggagctggaggtgggtggtcactgaagtgggaggtggcagggcccaggggtctctggctgaggtgggggtccggggctggaggggctgtggatggtagtctatgatctggactgcagggcgggcagggggtatccctggaggggagcagcatggtttgaaggtctctgatccagatcatgtgctgagcctgggggtctccggtgggggtcactgggtctggaggcagcagggaggacgcagggagcaaggcctaggggtcttggcgcacaggggtgcgggtgggagtggcagggtccctggatggtgggggaagagggaggggtcttgtggtcatgggtgggggtggaggaaatagcacgacccctgaagggaggggtcctggagttcaggagtcataggttgggggttacggactgaggtggtgaggactggggacggggggtctcaggtgagagcggagaagtctctccatcctgggatgcaggggtgacacacttgagtgtagtggggtcccagggggccccgggagtagagagtggaagggcagtgggcaggggtgaaggacctggggaaggaggggtcctggagagtccctgggtacagggacggaggggtcaccagtaggggtcccagggggagaggggcggcaggcaagggtgcagggcctggggatggaggggtcctgaggatccccgggtatagggatggaggggtgtggcatgtggggtcatgggtcctagaaacagtgggttggggtcctgggaatggaggagcagataggggtacacgtcccagggttggagggtcacaggagtcccaggggtggtgggtgggggtgcagggccagggcatggaggggacccagggatgcaggccaggtggggtccagggatggaggggcctggggtgtaggcaggggttccagccggaggtggaggggcccagggatctgggggcagaggtgtctggggacctggggtgcagggaggggtgaggtccagggatggagcgtcctggggatggaagaatggagggtcctagggtgcaggcggggggtggagggccctgaggatggggtattcagggttctggggtgcgggctgggtggggtttgaggatggaggggcccaggggctccaagtgcaggccgagttggagggtcccaggaacggagggtaccggagtgcaggctgggtgggtccagggacggaggagagcaggggtcccaggggtacagggcctgggatcccggggaacaggctgggggcgcaagccagaggtggaggatccaggggggcctggggatggaggggtgcagaggcccagagtgcaggcctggtggggtctggggacagagaggtgcagaggcagggacagaggggtgcagagcccagggaactgggtggagtctagggatggaagggtgcaggccccggggtgcaggccgggtcggtttcaggaccggaggggtgcaggggtcccagggacagaggggtgcagggcctcaggtgcaggccccggggtgcaggccgagttgggttcggagcctgaggatgcaggggtgcaggggtcccggggacagaggggtgcagggctcggggatggaggggtgcgggggtctcggggacagaggggtgcagggcctcaggtgcagggcccgggcagcaggctgggtgggtcggggccagggctggcggggtcggggcgcccacctgtgcgcggggatgcgctgcgagctgagccccttgcccaccaggaagtgcacgtcgcacagcacctcgttgttgaagaggaaggcgaagcgctcctgcacggtgggcttgctggcctgccagttgtacgcggcctcgcgctgcagcgccgccgcccccgggcccgccgcctcctccgcccgctccgcgcccgcggcctgcgcgtctgtcccggggcccggcggggcgggcggcgtcggcccaggggcggcggcggcggcggcggcggcggcggcggcggcggccgcgttgccgggggccggggtggcggcggcgttggcgctgggcccgggactgccccccgtgcccgggccgaccccgacccccggcgggcacgacgcacgcccgccgctcccacccgccgccattttgtggctgcggcgtgggcgggggaggggaggagggaaggagggaggggaggagggaaggagggaggggaaaggaggagagtagggggaggagggggaggagggaggggaggggaaaagaggagggaggggaaaggaggggaggagggaggggaggggaagcgggaaggagggaggggaggagagggaggggaaaggagggggaaggagggaggggaggagagggaggggaaaggagggggaaggagggaggggaggagagggaggggaaaggagggggaaggagggaggggaggagagggaggggaaaggagggggaaggagggaggggaggagagggaggggaaaggaggggaggtgggaggggaggagggaggggagaagggaggtgaatgggggaggctgttgcaggggaggggacggggaggagagggaagagtaggaggggcctgtagaggggaggagctggtggaagacctcttgctccactccctaagcatcctgacctgaagcccagactccagaccgaggtccagaatttggggtccaggcaccaggccccagactccagaccgggaatcctaaaccctggagcacagacctcagtccgggatcccaggcctcagaccttgaatcctagatcccagactctgaaccccagacttcagactccggattccagatcccatacctcagacccggaacccccaacccaaagaccaagcgcaaactccagaccccagaccccggacccaggtggcgggcctgctccgtggcgcaggctccgctgtacagagacatagcctgaggccgggaagctgcggatgagcgagcaggatgcaggccacgtgcactgacactcagcagacgcccagcaccctctccaggccaggtgtggggggtggtcagtgtggacggagctgggactcccccaaaacgcttactacatacataatgtcaaggtagacaaatgccacaaagattgaggaaccaggtcgggcgcagtggctcacgcctgtaatcccagcacttcaggaggccaaggcggggggtgcatcacctaaggtcaagagttggagaccagcctgggcaacatggcaaaa[134 bp omitted]gtgaaaccccatctctactaaaaatacgaaaattagccaggcttggtggcgggtgcctgtaatcccagctactcgggaggctgaggcaggagaatcacttgaacctgggaggcggaggttgcagtgagccgagaccgcgccattgcactccagcctgaacaacaagaacaaaactccgtctcaaacaaacaaacaaacaaacaaaacaaaacaaaaaaaaaactaggcgtggtggtacgcacctgttgtcccagctactcagaaggctgagacggaagcatcacttgagcctggaaggttgagcttttgatgagctatgactccaccactgccctccagcctgggcaacagagcaagatcctgtctcgaaaaaaaaaaaaaacaaagaagaaaaagaaaatagggtattaaaaaaacccaagtgataatgctattttcagttctccagagtgggtggttgaggtagttacaatttttttttcttttttcttttttctttttagagtctccctctattgcccaggctggggtgcagtgatggcgatcttggctcactgcaatctcagcctcctggttcaagcaattctcccgcctcagcctcctgagtagctggggttacaggtacccgccaccacgcctggc[135 bp omitted]gcctcccgagtagctggaactacaggcgcctgccaccatgcctggctaattt[132 bp omitted]acaacctccgcctcccggattcaagcgattctcctgcctcagcctcctgagtagctgggattacatgcaccaccacgcccggctaattttgtatttttagtagagacggggtttctccatgttggtcaggctggtctcgaactcccgacctcaggtgatccgcctgccttggcctccccaagtgctgggattacaggcgggagccatcacagccggcctctaaatgtcaactttcttatctctcatctcatacatttgcaaagtgacatctttccagccaaatcctaaagaggacatctgtgcagtcccttctagatgaaggtgcagaacaggcatacctgccatggtgacagaaattaacaaaatggtaggttgtctgaggaaagggtgaactttacggaatgctgagatgttcacgattttttttttttttttttttttttttttttttgagatggagtctcgttctgccacccaggccagagtgcagtggtgcaatctcggctcactgtaagctctgccttccaggttcatgccattctcctgcctcagccccccgagtagctgggactacaggcgcctgccaccatgcccggctaattttttttttttttttgtatttttagtagagtcggggtttcatcgtgttagccaggatggtctctatctcctgacctcgtgatccgcccacctcggcctcctaaagtgctgggattacagatgtgagccaccgcgcctggacttttttttttttaaagagctgtaggccagccatggtagctcacgcctgtaatcccagcactttcggaggccgaggcaggcagattacttgagttcaggagttcgagaccagcctggccaacatagtgaaaccctgtctccacaaaaaaatacaaaattaacaaggtgttctggtgtgtgccggtagtcccagcttttgggaggctgaagtgggaggatggctacagctggggaggctgagattgtgccactgcactccagcctgggcgacaaagtgaggccctgcctaacacacacgcacgcgtgcgcgcacacacaggcacacacacacacgggatctcactttgtcgcccaggctgctcatgaactcctaggctcaagcaatcttctcgctaggcctcccaaaacgctgggattacaggtgtgaaccactcggccatgtggagattttttttttttttttttttttcttgagacagagtcttgctctgtcgcccaagctggagtgcagtggcgcgatctcggctcactgcaagctctgcctcccgggttaacaccattcttctgcctcagcctcccaagtagctgggactacaggcgcctgccacc[131 bp omitted]caccgcacccggcccatgtgattttgagaggggtgtgagtgatacaggttcatgcatttgcctaaattaaccaaactacgcttaagatttgtgcattcgctgtaagtaaaccatacctctcactagacctaaacatattacggatggagattatctatgaaggcagaaacatgagtccacctcagccctagggctggcaagggaagcttgcggagcctttttgtcctttgtcagtgcttttttttttttttttttttttttttttttttttgctggctattgagccaacacctgcccctggcagtgcgttttgagcgtttttgagttttccccgggtttctggaaccaatcccagccctgtctatgcggtgatggcgtctagagggcgctcgtcaccaagctgattgctggatttccattcatttccagagaagtgtgcagttcacataatagaaccatccttggccaggagggtgggatgtcatttcttccctcccacggtcccctttcctcttctctgactccaggacactcaggctggctggctttctttctttggctggcttgctttctttcttgttcctttctttctttcttttttccttccttccttccttccttccttcttttttctgcaaagtctcgctctatcttccagggctggactgcaatggtgcggtcacagctcactgcagcctccacctcctgggctcaagtgatcctcccgcctcagcctcctgagtagctgggaccacaggcgcgcaccaccatgactaatttttttttttttaaagagtctctcgcggccaggcgtggtggctcacacctgtaatcctagcactttgagaggctgaagcagg[132 bp omitted]ctgaggcaggagaatatcaagaactcaggaggcggagcttgcagtgagctgagatcatgccactgcactccagcctgggcaacagagcaagactctgtctcaaaaaaaaaaaaaagtctctcgctctgttgcccaggctgaagtgcagtggtgtggtcttagcaaactgcaacctccgcctcccaggttcaagcgattctcctgcttc[134 bp omitted]gcctcccaaagttctgggattacaggcgtgagccactgcgccagccaacactgggactcactcaggaatattatgcacaccagaaaggcctgatgtggaagaaaatatttaaagggttcacaaaaaaatttagagggagcaactgaaggagattagaatatgccatgtcaaaatatgccaccttaggagccgggcgcagtggctcacgcctgcaatcccagcattttgggagactgaagcaggtggatcacctgaggtcaggagtttgaaaccagcttggccaacatggtgaaaccccatctctactaaaaatacaaaattaaggccaggcacagttgctcatgcctgtaatcccagcactttgggaggcca[132 bp omitted]tgaggcaggagaatggcgtgaacccgggaggtggagcttgtcgtgagccgagatcgcgccactgcactccagcctcggtgacagagtgagactctgtcccaaaaaaaaaaaaaaaaaaaaattagctgggcgtggtggcacacacctgtaattccagttactcgagaggctgagccaggagaatcgcttgaacctgggaggcagaggctgcagtgagccaagatcacaccactgcaccccatcctgggcgaaagagggagattctgtcttatgagataagagaagataagataagatgatgggataagccaagcctcaggaggaaataaagaagagacctttggattgaattgtgaccaggacagaagggggcatgtcaacccctctgtctcactgggctctccttgcccttcaagtgctggccccaagtccccttctctgcaagccctgcccaccagcccctctctctggctgcagagaaaagccagtggtggcagacgcctggggacagccatgtcctggccacctggcccagccccaggctggggcaaccagtgaggctcttccttgtggatttcaggcactctcattggcaatgaagtgctgtgtgcttagttccttacggctgtgtcacctgaacagttctgcccagtgagttatgaacagaagaggtgtgactcttctagcctgtagcatttaatggccagggcaagaccctccagagacctctcctgtgtgctccattggagatggtggctgtgagccaggagtgaggagatgtgggcagagccacagccacccagcaaaagagctggaaagcaacctgtgcgtgctttatacttcattttttgttgtagtggtaaataaaatacacataatgtaaaatttgccttcttttgttttgagatggactctcaccctgtcacccaggctggagtgcagtggcgcgatcttggcttactgcaacctccgcctcccgggttcaggtgattctcctgcctcagcctcccgagtggctgggattacaggtgtgcaccaccacacccagctaatttttgtatttttagtagagacagggttatgtcatgttgcccaggctggtcttgaactcctgggctcaagtgattcttcccctgtcttggtctcccaaagtgctgggattacaggtgtgagccgccacacctggccggcttgcttgctttctcttttttctttctttctttctctctttctttctttccttccttccttctttctttgtcttttctttctttccttcttgtcttttttctttcattccttccttccttcctccctccatccctccctcctttctctctctgtccttccttcctccctctctttctttctttttcctttttttttttccctgagacagggtcttgctctgtcactcaggctggagagcactggtacaaacatggctcacccactgcagccttgacttcctgggctcaagcaatcctcttgactcaacctcccaagtagctgggaccacaggtgcacaccaccacgcacggctaattttttttattttttgtagagatggagtttcaccatgttgcccaggctggcctcaaactcctgggctcaagtgatcctcccaccttggcctcccaaagtgttgggattaccggcgtgagcctcggtgcccggcctcacatgttaagtcctttcaggagagtgaggtgtgtgcagataaaccagatcccaggcgggcgtctcccacttgaagtctaaatgatgctgcctgaacacacccggtggtagcttgcttccaagaaggcagctgttggtttcttccctcccatgaggaggctgagttcattcttccagctccttgaatctgagctggctttgaccaagagaagatgatggaagtgactgtgccagtccctggcctcaaagttcctgcttcctttctccggggtcacttgtgcttatggaagccacatgccatgcaagagatgtgactgctgagcacggtggctcatgcctgtaatcccagcatgttgggaggctgaggtgggtggatcacctgaggtcaggagatcgagaccatcctgactaacatggtgaaaccccatctctactaaaaatacaaaattagccgggagtggtggcaagcacctgtagtcccagctactcgggaggcttaggcaggagaatggcgtgaacctgggaggcggagcttgcagtgagccgagatcgcgccactgcactccagcctgggtgacagagcgagactctctcaaaaaacaaaaacaaaaattagccaggcgtggtggtgggcacctgtaatcccagctgcttgggaggctgaggcaggagaattgcttgaacccgggaatcagaggttgcagtgagctgagattgtgccattgcactgcaggctgggtgacaagagcaagactccgtctcaaaaaaaaagagagatgtgaccacctcactgtgtgtgaaaagccatgaagggtggaacatgccagccatgaaaacagagagaagccagagagcacagaggggttggacgtgtgtgaagaagcccccttgttgggaggccgagatgggtggatcacttgaggtcaggagttggagaccagcctggtgaccatggcaaaacctcatctctactaaaaatacaaaaaaaaaaaaaaggccaggcctggtggctcacacctgtaatcccaacactttgggaggccgagacaggcagatcacaaggtcaggatatcgagaccatcctggctaacacggtgaaacctgtctctactaaaaatacaaaaaaattagctgggtgtggtggcaggtgcctgtaatcccagctacttgggaggctgaagcaggagaatggcatgaacccgggaagcagagcttgcagtgagccaagattgtgccactgcactccagcctgggcgacagagcaagactgtctgaaaaaaaaaaaaaaaaaaaaaaaaagccaggcatggtagcacgtgcctgtaatccaatcttcccatctacccaggaagctgaggcaggggaataatttgaacttgggaggcagaggttgc[132 bp omitted]cttcccagtggcctcagccaatgctgcgtggatcggagacaaactgcctaggcaggatgaaccacctagctgagcccttcccaaactcctgacccacaaaatcctgagcaaaataaaatggttgcttttgaaaccacccccgttcggctgacacaaattgcatgctaggttctggacagagacacaggtagaaataagcatgacacaggctgcgctctggcccacttctttggtgctaaaagacatggagcactggattctgagcacttgcatcctgttgttcctatagaaaggatttctgctgttaggactctaagactgtttaagaattgatttggggccagg[138 bp omitted]tggtggtgggtgcctgtagtcccagctactcaggaggctgagacaggagaattgcttgaacttgggaggcagaggttgcaatgagccaagatcacgccactgcactccagcctgggcaacagagcaagactgtctcaaaaaaaaaaattgatttggggtcaggcacagtggctcatgcctgtaatcccagtgctttgggaggttgagtcgggggatcgcttgagcccagggattccagaccaccctggggaacatagcaagcccctgtctctacaaataattttttttttttg[131 bp omitted]ccaagacgcctggctaattttttgtatttttagtagagatggg[148 bp omitted]tctctctctccttccttccttccactctctttctttctatctttcttcttccttttttttttttctgagacagggtcttgctctgtcactcaggctggagagcactggtacaaacaaggctcactcactgcagccttgacttcctgggctcaagcaatcctcttgcctcagcctcccaagtagctggcaccacaggggcacaccaccacgcacggctaatttttttttattttttgtagagatggggtttcaccatgttgcccaggctggcctcaaactcctgggctcaagtgatcctcccaccttggcctcccaaagtgctgggattacaggcgcgagccatcgcgcccggcctctacaaataatcttaaacattagctggaagtggtgtcatgcctctgtggcttcagctacttcagaagctaaggtgggaggattggttgagctggggaggttgaggctgcagtgagctaagagcaggccactgcactctactctgggggacagagccagaccttgtctcaaaaaaaaaaaaagaaaaaaaaattgattactggatctctgatgttagactcataaaacttttttttttttttttttttttgagacagtctcactctgtcactcaggctagagtgcagtggcttgatctcggctccctgcaacctctgcctcccgggttcaagtgactgtcctgcctcaacctccagagtagctggaattacaggcgtgcaccacaaggcccagctaattttttttgtttgtttttgtatttttagtagagacgggggtttcaccatgttggccagactggtcttgaactcttgacctcaagggatcctcccagtgcggcctcccaaagagctgggattacaggcgtgagccactgcacctggtgcctatattttcattctggaaactaaaacggttcctgatacacagtataccaaatatatgtcacttcctttatgataggagggcaggaggaagggagagaggaaaagataaagagagtgaaggaggttgggcgcggtggctcacacctgtaatcccagcactttgggaagcca[136 bp omitted]gaggcaggagaatcgctggaacctgggaggcagagtttgcagtgagccaagacggcgccactgcactccagcctgggcaacagagcatgactccatctaagaaaaaaaaaaaaaaagaagacaggaggagcccctatcctggtacagtgagcccccccacacaccccattttacagatggccatggtgaggcccaggtggagagaagcccgggctcacatggaaggtccggagtccggagtccggagtccaggttaggaggcacggccagagatcgccgcccactcagcctcctggattgcacggttcagtttgatgcacttttatttccaagaacaaaggataaagggactgttattaaattataccaccagtgccctgctcaagcacacacaccagacacacacacacaccagacacacacacacaccagacacacacacagggccacaagtgaaactggccaggtctggctgggtgtggtggctcacacctctcatcccagcaccttgggaggccgaagcaggtggatcacctgaagtcaggagttcgagatcagcctggccaacatggagaaacccgcatctctactaaaaatacaaaaattagccaggcgtggtggtgggcacctgtaatcccagctacctgggagactgaggcaggaaaatcgcttgaatccgggaggtggaggttgcagtgagctgagatcacgccactgcactacagcctgggtgacagagcgagacgccagagtgagagcgagagccagagagagagagagagagagaaagaaagaaagaaacgggccaggtctgaataaagtggatgaattgtatcaatgccaacagcgtggttatgacattgtaatagactgttgcaaaatgttaccactgggggaaactaggcaaagtgctatttcttataactgcatgtgtttccaatcattacagcaaaaaattcaattacaaaatatatatattttttgaaacatgatccaaagtgcaggggcgtgatcacagctcactgcagcctcaaactcctgggctcaatcctcctccctcagcctcctatgtagctgggaccacaggcaggcaccaccacacctggctaattttttatatttttagtagagatggggttt[144 bp omitted]caaaaggtgctcacaaaagggaaaccgaggcagggcatggtggttcacacctgtaatcccagcactttgggaggccaaggcaggaggatcacttgagcccaggggctccagaccagcctgggcaacataatgagaccccacctctaaaaaaaaaaattacaaaaattagctgggcctggtggcgcacacctgaggtcacagctactcaggagactgaggtgggaggatgatttgagcatgggaggtcaaggctgcagtgagccatgacagcaccactgcactccagcctgggtgacagaatgagacctcatctcaaaaaaagggaaactgaggcaggggagcgctggagctgttgccctcacacttcacgcggggaaactgagtctccctgggggtggcgggatgaatgtaccccagggcatcttcccgaggctgcccacagaccccaagccctgcatggcagggagtgaaatgttagcttgatagaaggaatgaagacagccagaaatggaatgaacagggcaggcaccaccggggagtcagtgaggttccaacccaggggtgccagttctatccggccacccaaaccccaggtgggaacactcgtatcagcgggacccccagctcacccaggcttccccgacacagggagctggccctcccaccctcccttcctctctccccaacgcttaccccatcccagctttgaccaaggaggtaggtccttcctcacgtctgacttgattccatcacacttcactttaaacaggtttctcattcttcagggtgagtcagagaccaggacaggccacagggttgcctttggcaaggggacaattaaaggccagaatgaaaggggctgatccagcaggagggatccctgtggttagtgacaatggcaggaagtaaaatttgtgtgagtccttttatgctgcagagggaggagagacatcctgctggccttctcccagtcct[133 bp omitted]ctgcctcagcctcctgagtagctgggactacaggttcccgccacca[184 bp omitted]ggtctcactgtgttgcccaggctggtgtcaaactcctggcctcaagcgatccactggtctcagcctctcagtgttggaattacaggcatgagccaccgtgcccggccattattactattattaattgagacagggtcttagtttgttactaagtttgttacttagtttgttactaagtttgttacttagtttgttacaggctggagggcggtgatatgatcatagctcactgcagcctcaaattcctgggctcaagggatcctcctgcctcagcctcccgagtagctggaactacaggtatgtgccaccacacctggctaatttttgtattttttgtagagatacgggtctcactata[135 bp omitted]gtggctcacacctgcaatcccagaactttgggaggctgaggcgggtggataacctgaggtcaggagtttgagatcagcctggccaccatggtgaaatcctgtctctattaaaaatacaaaaattagccaggcatggtggcgggcacctgtaatcccagctacttgggaggctgaggcaggagaatcgcttgaacctgggaggcggaggttgcagtgcgccaagattgcactactgaactccagcctggtgacagagcgagactctgtcaccaaaaaaaaaaaaaaaaaaaagaccaagtgcggtggctcacgcctgtaatcccaacactttgggaggccaaagtgggtagagcacttgaggtcaggagttcaagaccagcctgggcaccatggcaaaaccctgtttccactaaaaatacaaaaattagctgagtgtggtggcgcatgcctataatctcagctacccagggggctgaggcatgagaatcgcttgaacccaggaggcagaggttgcagtgagccgagatctcgccactgaactccagcccgggcgacagagcgagactccgtctcaaaaaataaaaaaataaaaacgatggcactgtgaacgggtctgttgactatttcttggtctcttggtttatctcctcccagctcaggcttgctcctcgccacagtggggctcaaggcagttgcacctcggcacaattttctttttttttttggagacggagtcttgctgtctcccaggctggagtgcagtggtgcgatctcggctcactgcaagctcctcctcccgggtttatgccattctcctgcctcagcctcccgagtagctgggactacaggtgcccaccaccatgcccagctaattttttgtatttttagta[133 bp omitted]cgtggttttagctttttctggaaaatcgacttaatccgcctaccacagccactctgcttcctgtaaggccactttccctgggttcagagagagtcctcgctcctctagcgctgcctcactttgt[140 bp omitted]cccatctctactaaaaatacaaacaattagccgggtgtggtggcgggcacctgtcgtcccagctactggggaggctgaggcaggagaatggcgtgaacccggcaggcggaggttgcagtgagccaagattgcaccactgcactccagcctgggtgacaaagcgagactccatctcaaaaaaaaaaaataaaaaaggctcttggggccgggcgcagtggctcacgcctgtaatctcagcactttgggaggccgaggcaggcggatcacctgaggtcgggagttcgagaccagcctggccaacatggagaaaccccgtctctgctaaacacacacacgcgcgtgcacacacacacacacacacacacacacagaaaaagttagctgggcgtgatggcctgtgcctgtaatcccagtcactcagaaagctgagcaggtgaatcgcttgaatccgggaggtggaggtcgtagtgagctgagatcgtgccactgcactccagcctgggcaacagagggagacgtcgtctcaaaaagcacctgtgttttcggaacattcaccatgtttgcaggagcactattggcacggaaaaaaaaatgttttgttttgttttgttttttctttttgtttttgccagagtcttgctcttgttgtctaggctggagtgcagtggtacaatctcagctcactgcaacctccgcctcccaggttcaagcgattctcctgcctcagcctcctgagtaactgggattataggcgcccgacaccacgcccggctaattttttgactcttagtagagacaggg[136 bp omitted]gggtttcaaagaaattgtgaaggtcacagggtttccgcacagtccacaccccacacctggtttctctgacaatctgtgtggtgcagtagcatgtgctgctgtctttttaaaggatccccgaatcactgctgcaatgtagaggtgattttgccatgaaggattcagtttgctcccacccctgacccggtgggacacgtgggcagaccccggcccgggcacctgtgcgccagagctggtggttcccttcacagaggggcagactgggctctggaggctgggggtggcctcggtcaccgcctgtgaaaggctcccagttcctccagctccagaattttcctgccactctacaagaagagactggaagagggcgggactggcagagaggaaaccacaaaaacaggattgagagcagcagctcagaagacaagctgttcctggcaggcggccgggggcaggcagcggtcagcgggggggcctggcagggctgggcggggctcggtgccacccgggagggaagtgacttggcctatggcacctcccacacttcctacacacaagccaggctgggcaagggacaagggcaacaggccagggagccctgaggatggccgggtgggggccgtctgtgtgccttcattcattcattcattcaatctgttatgtgcgagttcacaaactaggacaaaggaggagacagctgagctcagcccaccttcaagggtggcagatgagtaacccagggcgaggaacattcacggatggtcatgcggctgcaacacggcccgagctcctagggagcacctccagaagtgatcccagatccgggggctgaagggtgcagaggagaaaccaggtgcagaggatgttggggaggccccgctggaagggggagcaggtgcataggcccggcatccagaaggagctggggctggagaaactgagaggagggcagagtttgagggggaggcttgcaggctgggtactctgagccttgaactcctgggctcatgcaatcctcccacctcagccttccaaagtattgagattacaggtgtgggccactgtacccagactaaataaaataataataattattattattatcattattattattattattattattagaacctaaactaggtgccagggcagccaagagcactttgtttttgtgctgtgggcaatggggagccatgggaggtgttagagtaggggtgggctgtgattggttttaagtcactaggagaaaagaggcagaggcaggaatgggggctagaaggtcagcaaggagtctggggccttggcctggggtagcagtaagggggaggacaaaagtgggggtgattttgagaggagacttgggagttgagattcaaagggtgtgatggggggaaaggaggagaagacagggaagaccaaagccagagagaagagagaccctagggatggggctgaggagagagagccgtccccagctcggatgaggctcagacaggttggccgcagcacccagagaaaacctgggagctgggaccctctgggtttctgggggctgccactgtccagggtagaggcctggccaggccccaccctgtggtcatctggcccagccctctgttttccagatggggaaactgaggcccaggttggcagtcatcttgccagccccatagccccttttccaggggacagctcggaacctcgatttccagtctgtgccttgaggctgtgggggaagctaacggaggaccctgagcccctccctcccactgcagctgcagaacagggctagaaggacttcatgggtcatggggttcagtcgggactgtggggtagccacgaagtgccctgcagggggtgacagacccccggtgcccggcccacccttcacctcccccagcagttagccctgcagggctgggcccgtcctggccatggccgtggtctctgctccacctgggtctccccggacccttcctcctctaggcccagctggaatccaccacccccggggccattcacatgaaaagtccagaacaggcaaatccccagagacagagagtgcactagtgaccaccgggggctggggaggtggggaaaggcagtgactgccggtggggcgggcttgctgttccgggtgatgagaatgttgcagaattggattagaggcgaaggctgcacaactttgcgtgtgctaaaaccattgaattttagacgcagtgggtgaacagcggtgctgaggtttttttgttttgttttgttttgttttttagaaagagtctcgctgtgttgcccaggctggagtacggtggtgcaatctcggctcactgcaacctcagcctcctgggctcaagcgatcctcctgcctcagcctccctagcagctgggattacaggcaactgccaccacgcccggctaattttgtatttttagtggagatggggtttcaccatgttggccaggctggtctcaaactcctgacctcaggtgatcctcccgcctcggcctcgcaaagggctgggattacgtgagtgagccaccgcacccggccaggtgctgagttttatcacagtaaagctgttatctgaaaaaataaaatgctgcctgggttccctgttgcctttggggtgccgccccctccccggccgtggtcgggtgtgtccccacacggtgcttactctcgcgctccagcctgtcggtgtgcaggtaccataagcttccttcacctcctcacgccttctcccatgcaggctcctggggcagggcagggaacccttccgtcccgagcgccatctctcttgcctccagccccctccaggcccaaaccccgcccctccagaccgcaagccccgcctttccaggcccaaacctggccccagacacaagcctcacccccacctccagttcataagccccgctccctccaggcaaaagctccgccccccaggccataagtctctgccttccaggcctcaaacctcacccaatacacaagccccgccccgtctgggaacctcccccaagcctcgcccctccaggccccaaacttcgccccagacgaggccctaacccttcagattccaagctccgcccaccaagtccaaggctccgccccatataataagccccacccccagacgccaagcctcgccccctccaggcctcaagtcccgccccctcaggcgacgtcatcggtttctttcttgctgggttttgtccctgcactgcgctaccagcctgtagctcacctggctgcccttggctcccgcttgatgaatccggaaactgaggcacacagtagcctggatacagctgggatttcagcccaggctggcctccttaaccactaggcttcgctgtcctccttccgctcccgcctccaggaagcccttcctggtctacacccaactccaggatctgaggtcagcccttggccgtccagctcatcttctctgccaccagccccagcacagcgtcctgcctgcaacaaaaacttaataatggctgaggggggtgaaccctaaagcaggcaggggccggccatgtgcagaaggttacaattactaggacttgttaggttgcacagtcccaaggcagcggcaacaacgtctctcaccctctcccaggaggagacccttccccttcccttgaacctgggcgggcctcgcgtcttctgtgaaaccagagaaggtggcgggggtggcgctgcctggcttctcagcaggtcagcctggcagcttctgctttgtttgcttggaaccctgcttactggagcccgagcttgggaacacagctgccatgttgtgaggaagcccaagccacacggggaggctccctgcaggcgctggccctggtgaagagctcgcagctgagccctgactgggtgtggtggctcacgcctgtaatcccagcacgctgggaggccaaggcagctggattacttgaggccaggagttcgagaacagcctggccaacataacaaaaccctgtctctactaaaaatacaaaaaattgacttggtgcggtggctcacgcctgtaatctcagcactttgaggggccgaggtgggcagattacctgaggccgggagttcaagaccagcctgaccaacgtggagaaaccccgagtctactaaaaatacaaaattagctggacgtggtggcacatgtctgtgatcccagctactcgggaggctgaggcgggagaatcgcttgaacctgggaggcggaggttgcggtgagctgagatcacgccattgcactccagcctgggcaacaagatcgaaactgtctcaaaaaggaaaaaaaaaaaatacaaaaaattagctgggccgtggtgacgcacgcctataatcccaaactactcgggaggctgaggcaggagtatccctgaactcaggaggcagaggttgcagtgagccgagacatggcaccactgctctccatccagcctgggctgtgaatgagattctgtctcaaaaaaaaaaaaaaggacagggtctcactctatcacccagcctagagtcagtggcatgctcacggctcactgcagcctctacctccttgggctcaagttgtccaaccgcttcggcctcccatgcagctgggactatgggtgtgcaccaccacgcctgggttttttttttttttttgagatggagtcttgctctgtcacccaggctggagtgcagtggcatcgtctcggctcactgcaacctccacctcccaggttcaagcaattctcctgcctcagcctcccaagtacctgggactataggcacccgccacctcgcccggctaatttttgtagttttttagtagagacagggtttcc[144 bp omitted]tggagtgcagtggcatcatctcggctcactgcagcctccgccttctgggttcaagcaattcttgtgtctcagcctccagagtagctgggattacaggcatgttgcaccacaccgggctaatttttgtatttttggtagaggcgggatttcatcatgttggccagacctcgagtgatccacctgccttggcctcccaaagtgctgggtaattacaggcgtgagccactgctcccagccgagctcagctttttgcctgtcttcccagcagtgcatccaggcatcctggagcagagacagaccccacaggagcgcaccccctcaaaactcctgactcagcatcaccagcaacaacgtggttttgcaccaactggttgtggatggctccttatgcggtgacagaaaactaaaactcaggcacacagcaagttttttgacttttattaaatctttacaaaacagaatacaaaattccggcattgacagttggtgtaaaggaaaacttctgagctccgtcagttcacctggtacattggaattaaagtgcttggatgtttttcccccactttaaaaaaacttttgaggttttttttttttttttgtcttttaaaaacatcgtaacattaacacatggccgttcaccgtcccccagcgatgggagctggcctggggcccagggtcctccaggatcttcactcattcacagtaacggttctgaccagtcctccaggtcgcacgtggatgcgacaggggtggggagggaggaggaagtgactgtcccaccttcagaaaaaaaaaaaaaaacaaacaaacaaacgctgctagccactcagctttagagacccgatggctatgggcgcctgcagcgggcgggggtccatttgcttgttctttgatacaaaaaggcagagaatcccccgttacgaaacatggaatcactgacaggcgagaagtgatgggggaaaggggtgggcggaatgccccaccccccccaggggtctttggaaggggcagtccacagatatgggcagtggggaccagggaaggcagagcacccccacggccaccggactgtgaccatcatacgagattcaggaggggcagcagggccaggcagacggtctccgaggcccccacccccaggccccccgacattcaagtattcttcaagaacagggaagcaaagtccatcgatgtgttgtttttttttaaggaaaaactaaaaaactaaacaggaggaagaatcccgaccgcggatttagaagccagaggggctgccccagctgtggagctcgggggctgcgccgggaagggcgggcggtgaccctagccgcgcgcacttctaaagtggaaccctgtattgcatagaacgtccccacccgcggggagggggcagcaggctccgcagcccccgggggttggagcatggagggtggggggactgagcagacccccgcattcctgggtgcccgaagggaggccgaggccgcagccgttttcctgaaggtggcagaccaaaaacactgccctgggggtgaggattcggccagaccccggggtctgggctcagctctaaggacaaggacggagctgacggagcttccaggtcaggcccgaggggcggcgcgaggcaggacgtggctacggtcagactgagccctgagaaggggcactcgggtgccccaagggggtgtcttcaggaccccccacattggctgacagtgcctgtccagcccctctgcctgctgcggtggaaacggcttcgggccaggcggggctcctgctgtctcaggccttggtgtggaggggaggggcagcggcgagcccctggggtcagctgcagtttaaggtcaaggtcggaggccgaatctggccaccaggagtcctggacagacagacgggccttgcaggaagccccgattgtcaactatcatggggacaaggcaggcgcgggtgaagggctgggggatcccatggggtgggtgggtgagctgcctgccacctgcctgcctgacacctccagagacaggcagcccctcccttccccaaccaagccaccaggggtgctctcagggtgagggatagaggggaagagcctgtccctgaaatactgcgggctgggagggaacacgagggcagggtcctgtgcccctccccagctctgcaagatggcaaacgctgtgggcctgctctcctgagtcactgcaagccacgtgggcagatggcgggcagcacaggtgacctgggggcaccttcatagtagaggtgagcagggcgggggaccggggaggggacaagcccacccacctaccctctgctcaccttcccgggtgcctgcaatgcttttaaccatccaaaggaaaaaataacggggaggggtggaaacaggaaaaaaaaaacccaaaagcaaaaaccttctataaaacacccccctcagctgagcttagtgcctgggaatccaggcagaggaggggcagcccgctggacaccggctggcgatagcttaaaaaacctttagatttgattgggggacgggtgacctatgtacagaggggagatgggagggtcaggcgtggtctcccaccaggaccactggggccgaggacagactggccctttgccgccgctgcgccagcttggactgggagggtggagacagctgcaggcagcgtgaggtagctcggaccaggacgggctggccctgccccgcggcctcctcctcagccaggtcctcgtcgtgctgggccagctgccggttcatggcaatggcctcagccgcgaaggacgtgaggtctttggcacagctgttcctgggaaacggggtgggggtaggtggtcaccaagaggcacccctcaggggacccctggggtctgtgaaggccctgggggaaggggcttcatgcccccctcccagcccccaccctggggctcctctgagcaccagggccccaccgggagcttcactgagtcaccaggcttgcctgcctccccgaccccaaagcagttctccgggtctttcacaaatgtcttaacctggaaaccccgccccctggactcaggggtcccgagcacccctgcgggccttacctctgcaggaccatgggagtgggcaaggtgttctccggggcgcactgcaacgagagtgggcgggggcagggctggagagcagctggggccgcctggggcgctgggtggggtgtctggccaagggatgccatgcccatcccatcaccaggaccccaccggagaccaggagtgcacctgggtgccccgggagccaagcgcccaccccgaggtccctatggtgaggctccatgtccccctgcccagggaacccgaggctgggccaggctgaggcctggtgttacaggacccagtgagggtgggggcagagccccaagccccatctctcccggctgttcccagcccaaacccacctccgcccccctcttaacccatgggtctctggatgcttctgcaaggagattggaggcccccagcccctcgcctggggacacagagtgaccccagcttctatttttagtaaatcctcactccctggggtggcagctcagctcagatgacctctggcaggagaaacacccgactcctcctcgactggaggccacacagggaagggtggaggcacagcctgggcttgagactgacggcaggctaggctggggtctatgtgagctgggctcgctgcccgcttcgctccagcctgctgcaggctgtgggtccccaccaccctccaggaaggttctctgagtagctgctcctgggagccgcctggctggccagcgggcaccgtgcacaggcgggcggtggggatttcggctgcacccctcatcccagggcagagcctgtgctctcaagcctcagtgcatctcagggtgtccaggctacaccctcagggcttcccatgctcgctctgaggccaccctgcagcgcccccatacccctcctgccgcccgtgcggctggtactcaccccctgaacccaggggtgctgcaggacttgggcggcactcagcctctgcttggcgtcacggaccagcagcttggagatgaggtctttggcagcgcaggagatgtgggcccagtccttgtcggggaactcgtacttgccctcctggatgctctcaaacagcatgttctggggacatagaacacaggggagcttagacctgcccaagggcctggatactgtgcactgacacgtggctccaaccggaccccaaccaggccctagaccaggccctagaccacgcacgcctggggcagagggggctgggagccggaccaggagagtcagctccacccaagtggagctggatttacaaaaaagcagctctgagggacctggttccagggaccacaggccacagatgctgagccttaagccgcgggcagggagcctgagcctgatccccccaaaccaggggcctcactccacctctcagctctctgaaccctgtctggggtttcccttgggcaggcaaacctgaaaagccttcgggaaactggcagacagggcggcactgccctgtggatggcatcagggagtagggcacaccgggcaggtccccaggggttagggggagtacagagtaggtccccgggggtctggggagcacacagggcaggtccccgagggttagggggtggtcagggggcaggtcccctggacttagagggtgcgcagggcaggtcccctggggttagggggtgttcagggcaggcccgggggaggagggtgcccaggagaggagggtgcgcgggccgccgcacctggcaggcagggcaggcctcgccgcggtcccagccgcagtcgctgccacagcggcccacgaagggcgggtagccgctgagtaggatatacaagatgacgcccaggctccacaggtcgcagcgcttgtcgtagatgctagcctcctcgctgaaggcctccactacctccggggccatgtactccgccgagccgcactgcgggcgggggaggggcgcgtcagccggggtttcccagcattacgtgggaaccgagcccgggtaactgcgggtcacctgcgccagccggctcggaccccgccccgccgggcccgaccaatcagcggctgccgggaacgcgcccccgcccaatcagcaggtgcagagctcgcccctcccccgccgcggccccgccccacccggccaaacaccgacgcgttggggcgcctgctcgaggccccgccgcgacaccccgcccaaccaatcagcggctgttgctaggcggaagcccgagctccgcggcctggagctgctggatggcccaggctccgcgaggttatgcaaccgcagagcaggcggccgagcccccagccctccccgcgggccctcaccggagtgagcagctccggggtggagataggggagcagtccccgttgagtttgatgccgctgcccaggtcgaagtcacagatcttcacgggggagacctgggaggggccaaaaggtccgtgagcctggggtcccacgcggtccacccctcccgcggggccaccctgccggaactggcctacctggttggggtgctcacagaggatgttttccggctttaggtccctgtgggcgatgcctgggggagaagccacagaaccacgacggggtgagggtctggaggtcttccaggagtccttggcaggcggccctaggagactccgggcggggtcaccacctacctttgttatgcagaaagtccaaggcgctggccacgtcctgcaccaccacgctggcctccagctcgttgaagtgccggcgcttgtggatgtggctcaggatggagcctgggcagggcagggcagggcaggacagggggaacacgcaggtcacctcaaagtcccctcaaggccagcacccacctccactttggcggggacgcccccacactggcttcctccagcacaaaggcctcacccctgagccaccatttgggcaggacactcaccccacaagccccctcctgcaggtggcactaggcccccatcccgtaatacctcccagctccctccctcctcacagcctggagcccccaggtacctccccgcatcttctcaaacaccaggtagaagcggtcctcctcctcgaagaactcaatcagctctaggacgttcctggggtgggggtgggggcaggagaggagctgaggcttcctgaggcccctgggtacctgctgcccggcctaggaggggcccaccctcttggtgctggcctgtccaccggaagctgggactggggcaataggccagcttcacactgcccgcctggggctgtcagccagcctgcttcagggaggggaatgcagggcctgggaaactgggtgccctacagacgcttgctgggggtgatgtggcactcaggcccttcatccactgaaagacagctcaggccagtgcggtggcaagggtggctcacctacctgtgtccctggcactggtacagcatctccacctccctgaaaaccctgctccgaatgtggcctggctgcttctcaatgatctgaaacaggcgaaaggacacagcacctgggttggtgggacgctcatagtcgagaaggggccagaaactccactgccacggctggaattcaccacacttaacgccctgcaactctagaaagcagggctcacgcctgtcatcccagcactttgggaggccaaggcgggtggatcatgaggtcaggagattgagaccatcctggccaacatggcaaaaccctgtctctactgaaaatataaaaattagctgggtgtggtggtacacgcctgtaatcccaactacttgtgaggctgaggcaggagaatcacttgaacccgggaggtggaggttgcagggagctgagatcgcgccattgcactccagcatcctggtgacagagtgagacttcgcctcaaaaaaaaaaaaaaaaaaaaaaaaaaaaagccagtggaggctgctctccacctgtgaccctgacagccctcagagacacatttgagacctatgacttctgcaaaatacccccacaggacgtgagggttccctgccctgggcggccaccctccctgacccagagacagtcagctgtagtcctctttccccacagggtgggtacctggtcacccatagaactagggaggcctcaggacacctggctgccagcccaccaggccccacctcacatgtggccacagcaccaagtcctgctccccagctccgtgccagcctgggcagacacttgcctgccgcctcagccaatatctgtttcgggcccaccctggttggctgtcccagccactggcggatccagcctccctgagccccagagcctcaggaagccactctactgcccccagcagctccagctgctccctgccaccttcactcacagaggtggggtgaggaggcgtctgcagcttcccctggcacctgctgggaccctcctgccaggctggacatgttagcccctctcactgggcgggtgcctggctgcatgagcactctgcccagggttccctgcccagtgcgatggcctggtggcagcagggatgtggcattccacccttgagtccctggctcctgcctctgcagtcccatgtctatactgacagacaacactgtcccagcgaggggcaagagaacaactggacgccagggtgtcctgaaataccaccacccaggccgctgctgaaagctgtgcccagcaggcactgcagatggttctggacaaaactgaacctcgtcctgtcccttgggtggctggctagaatgctgcttcagggagggggcgcagcccctcctggcatggaaggggcctattctgaggtcccagcatgggggctctgcatccagccagcagcctcacggcaccaggtgaccccagggtggcttcccgcagcatgaccccgagggcagagggcccacaccccagtccccatagaacgaaacaacgctcctcagacccacaggcccagcgattcgcctctctgactcgcccaggacacctcctcctcccactgccacctggccagaccaactcccggacgtcagtggccaacaacacctccagcaggaagtcccccaggctctgcagatcccaacactgaccacaccaggtcaatgtggcaagatgaccagggaggtggctctgagacaccagttaggatcccccagaggccacacagcatgagtcaggctacctaaccccctgagcctcagtgtccctatctgtcaaacaaagacaggaagcaaggctgggccaccaggagagggctgtgctcagaggaacgcctgctgtgtggaagtgcttccggaggggcctagtgctcctgcaccattgccttggcctgcctgggggctcccaggaggcagggaccgtccgtactgtgtctgtccctgcctgctgccactgtggtcccagcacctagccagtaacctccccaggttggccacccctcttcttcctccttctcctcagaggaaagctctagcctggccgtccaccaggacccacaggctcctggcgagccctgctcgccagggcacacctggccctctttcccaggcagccagccctcctgggaccccacccagcccgggagccggatgccaggtcacgagggaagcctggaagatttcttggaacacgggatccaaccggcccacaaggtcacagggtcacaaccagagcctcaacagggctcctgctcccagcccttcggccacaccctgggtccagcagccgcccagggctagagtgacacagggggctctcacgggcctgcactgaggttccccaaacgcagagcccctctgggccctgggatatgacattgcattttgatccttgaaaccaaactgtcatgtaccctcagggacagctcagaggcagggacggcccaggggacccaatgggcacagtgcctctgtctgaagcccccaccctggtaccagaggggccaccctcactgtcattcccgactggactcagggcccggtggccacttttagacacgggtcttcccggctgtaggacggacagccggaatgccacacactgtttccacccccgctcaacaccgatcccaaggcgctgggttccccagggcgcggcgcgggcccaccttgacggcgtactcctggctggtgatcaggttgatgcaggtctgcactcgggcatgagcgccctcccccagcacatcttcctgcagctggtagacgtctgccgggcagcggggcgggcgtgagagggaccctggcttttccccgctcccggctcccccaatgcccgccatccccgctcaccttcaaacctgcccgagaagctgtcggtggcccggccgcgcttcttcttcttgcccctcttcttggcgtccgggatgtcaatgggctggctggcgggcatgtctgttccaggaggcacgcccagggggctcaggacatggccctggccggccggcccccacccccctgcaggggctggccactgccatggcagcgacagcagctgccctgtgccctcctccccctcgggcccctcaccagggcgggctgagcactgcaggccaaagtcagagtctccgtggtcgggctggtctagggagaaggccagctcgaaggggttctgcccctgcaggggagaggagaggagaggcactcaggccccatccctgcccacgcagcagggagacctatcctgccccagtgtcgcagcgtccacactgacaagccctgcgctgagcattacggaaaaatcaactccgtccccgctcacacaccaggatcaactcccaccaggatcaactcccgaaggggcagacagcataaaccaggggacccccaagctcctgggattcacctcctcgctgccccacactcagtgtgtgtgtggatttctctcttttttaaatttatgttttgtagagataaagtcttgctacgttgcccaggctggtcttaaacccctggcctcaagcgatcctcctgccttggcctcccaaagtgctgggatcacaggtgtgggccacatgtggaaggcgtgaggcctcctagcacctcagcaaggcaagatcaggggacgcagagtctcttagggggtccatggaatttgccaacccagggggtgattctgtcccccaggagacactgggccatgtctggggacatctgtggttgtgaccggttgggggagctcctggcacggagtggggtggggcaggggtgctgctcagcaccctgcagtgcccaggacagccccaccccagagaaagatgggccccaacctccacagggccgtggggaagacctcctcccacctgcagagccctgggggcctctgggaaaggggtgcattgcggggaggggacagacacaagcagctggctcttgggaaccctgcctctgatgccaggattgagtcaccgtggggcccaagccgtgtcttgcacctccgtctgcttgtccacagaatggggacggctgacctctggggcgggtcgcggggatcaaaggcagcggggcagtgggaaggaggtgagtcactaggcgggctgccagcctggtggctgtgcctgctttcccacggcctcctgggccatctcagggcagctgagtcctccctgggcctcagtttcccccatctaagatggcacacaaccacctctccttcccctaagctgctcccctccctttcgctcagtgcctggggctggcggggtaagaattcagtgcctggtgctctggggcctgctgaaggtgggggctctgcttccatcacccctgccttctgcccctacccaagcccagacacctgcattcctccgcccatgtcccgcagctgcccggcacacctttcccctgccagctctgtgcacctacgcccccgccacccaccagaggctcatctgcttccagccccccaaccccgcagctaccagttaccgagtcagtatacacagtgctgtactggtcctgggggctcacgggagaggcacccacaggcgcgagtgtgccaggccctgcccagaccacatcctgcactctcccatttcagtgccagacacccctggagggagcccctggtgggccctgatacccggctaaggaagccgccttgggccctgggggccaggattcaaatccaggcctgttgcactgggcaggctggggctgggtcatttcttgacccagccccaggaccatgggagcaagaccctgaccagggtgcaaggaacagtgcagattagagtaggctttgcccagcccccgtggaagatggtggcatacatatgtacgtttccacagagcaaatggcccagcgcagggactgccggccctttacgaggggccgggcctttgaagctggggaaccgaggcccggtcaggttccttgtaccactgagctctcactcagcttcacccgtctgggtgaacccaggcgggaggggcccacagaggtggcgggggtcccagtcccagtgaggatgctggctgctctgggccaagtcactgcccctctctgggccccagacaacctgagtggggctctaacaagagggtcgttcagcagaagtgagactccagtggagcccgtgggagacccaaggccaggagatgggtggaggccagagggcagagtctgggaggggccgtgagccaagctgccctcctgcctccccacccaccctggctcgggcagatagctaccaggaggctgctgggggaggagggaaggaaggggggggctccaactagcccccatgggagtcagcattcccataaggctcctgtccagaggcccctggtggccctggggcagccaccacaaggcaggtgaccagggtctaaggccagactggagttcacctgctgtctgaccttggcctagtgacctcaccctggggtctgtcagcggtgagacgggaggcagctgcccccaactcgtgggagctcacgagagtgaaatgacctaaggggccacagagcccagcgtgagctcctggccctgtctggccaccgttcccctgtgccagccacagcctccaactcagcaaagctacagatggacggccgcagccaccacagcggaggggccaggcaccacgagactccgcggcctcctcgcccgtgtacaggggagccccaggcacacgcgcctgcagtctcagagcctcactttcccatctgcgaacggaaagaaacccaaggcacccacagacgtgcctccctgctgggctgctgcctgctggaggcaaggagagtatttcaggagaggtggccccaatccagggagcagccgtgcatggtgggggctgtggggggagattcctagagcaaccggtcccggccacctggaggaacacctcacagccaggactgcctgccaggccctcctccaccaagacgcccaccttcccagctcccagccaggctgccctggccatgcacagaggccggcccacaatcctgggcagtgtgggcggtcctggtcccactgttctaggtctggctgtgggactcgagtcagcaggccttggcaggaggtggctggaaccatctagaaagttcaagtgtgctttagctgcctggctggccccatgcactgactctgtatcagctcatgcctggccctaggagggagaagaccactgtcaggtcctcctctttcccgcccagcccctgacactctgatggtgccaggcctgctgccctaggggaaaactgggcaggggtggcaggggtggagtgctgccctggggcactggctggacagacctgggaattcttcccagtctctctttgctcctcccaccctggagcaccgcgttgtgtgtacacacaagacagagacacacacacacacaaacacacacacatacactcacactctctcttcctctctccagtcctgccttccctaccgggcaacaggtccctgcccaaggaagcccagtgaagcgattacataaccccggcctgaggggtggggcgggccggctgacatcactgcgtcccctgggccaggtcctgcggggcccctgcccagcacctgccctccccttcccccccaagatttgctcatctgaaaccagcactcaacagcagtcaccacccgggctgcgcagaaacttcccgctccgacaggaaacagcacttgggcctggggtgtctgcgaagtgcagggctgaggggacatcccatcccctcccccacggcacaggccccctgggggtgggtgcacctgaccagcccggcctggggattctgaaagaaagtccccagaagccacatggaggtgggaatgggactgtggcccgctgacccgtccccaccagggcacaaccagctggagcttgcaggggacaccccccataagccacatgcagcgactgggacaggactgcagcctgctgaccccccagaacatacccggcgggggcttgcaggggacacacagcctggtgccctgacccggagggggctcctgctcccagcctcacttgggggtcctggaggaaggacccggcggccatggctggagagaggactgtggcctgctgaacccccatcctcgcacaccgaccccgcttcagcgcacggccggcccgggcagccccgggtgtagggcgggggccaggcacgagccccgggagccgatcttaggggcgggccccgcgccccccacgccggccattccggtggtccagcccggagcgcccccaaaccgaccccgggcctcaccttgaacgaacggtggaaaccctgaagttcggctggtttcttctgcaccatcttctgtccgggccccgccagcgggggaggggaccgagggcccggggggaggcccgagggcgggcggccgggcggggggcggccgaggaggggaccctgcgggcgggagcagacaaagggagggcggtgagcggagcccggcctgccaggagcgcggaccgggcgggggcggcgagggctccgcggggcccgtttcccgctaccgggtcggtgtcctcggggccgccctggggttcgcactcaccggggtcgggcttgggccggggccgcagtgccgccgccgccccacgtcgcgcagcccggaccccgctccgcggaccgcgcggggaacagcgccgccgccgccgccagcgcggacccctctacctgggccaccgccgctgagaggagccgggcgcgtcgccgccgccgccacctttataggcccggacctgctctggccccgcccccgacgcaggctccgcccggcctcaccccctgcgcacgacgtgggcggagccagaagagggcgctctccgggaacccagtgcggctgcgcgctccggcggtggggcgtgtccgaaacggctagcgcacgcctgcgcagtgcggcgcacgggggtctcggtgcggaacctaggcagcgaccctgcggcgcgcccggagctggcctgtttttgccgcctgaggctcgcggggcccgtgggacctgcgaggccctgggccgtgtcctaccgcctggccccacacagggcaactcccttggcctgtcaacccaggcctagtataccccgactcccttggttcatgccctcgctctagaacctgccatggctccctcttgcagttctccagtgctggctccagcagtccccctcgtgcaccaccagcacgcttggagtcccagccactcccttctagtgctgggggaccagccaccgccacctactttcttcttcccctgggccaccctgcctggggagcactgagctccccgagtttgctttgtggttggcaggaaccagagtagagggtggggaccgaggtctgtgaaggacccttcctctgtcctcgaatagcatttcagggagaactgggacctgagacccactgggaaagagcccaaggggtggatggtcgccaggacaggaagtaaaacacagtcccattttggctggggccccaaaccaggcttagatagaatcagcctgtcctgagctgccagtcccccatcccacagcatcctggttcaaagtgctccccaggccccgggcctggggcacacaaggagtgggggttcccctgctgggtggactgtggtctcctcttctgcaggggtttccagaagcttcgcacagcccatcccaccatcccccaaccaggccctgagctcaagaggggctggagccccactgacctgaagctggagggcccctgcctgcaaggccacagctctcaggccacaggggctgggaggcctggcctcagccacccccggggcattggggggaagcctgtggggaattcccagccagaacccagcccagcacctggcattgccctgactcttggcaatggggggacagaaaaccaggtcccccagccccccttattgtgcatgtgggtgcgtgtgtgtgcgtgtgaacacatacacgcacaaacacacgttagctccaggtgccaactaggggtggagctgctagacctgcttgcctgggcctggctcacagagggcgcctagtaaatagtgcttggaggaaaggataagagtgtgtgtgtgtgtgcacgcgcacacgcgcacgtaggggttgtgtggtcgtgtgagcttcctggggccactgtaatgcaggaccacaaactggggggcttaaaacaacagaaatgtgtgctctcacagtcctggagcccagaagtctagaagtgtgggcagagctttgcttcctccaagtgctctaggaggatgcttcctgcctctgccagcttctgggggctctggtggtcctcggtttgtggccgcatcactccagtctctgcctcctcctctgtgtgtgtgtctcctcttcttattttattttcctttttttttttttttttttttgagatggagtctcattctgtcacccaggctggagtacggtggcacaatctcagctcactgcaaccttcgcctcccgggttcaagtgattcttctgcctcagcctcctaagtagctgggaatacaggcgcgcaccaccacacccggatagttttttgtatttttagtagagatggggtttcacc[137 bp omitted]ccaagctggagtgcagggacacattcatagctcacggcagcctcaacttcctgggctcaagcgatcctcctatcccagcctcctgagtagatgggacaacagcaccttgcctgctgatttttaaacattttgtagagatggggtctcactatgttgcccaagctgcactagaattcctgacctcaagggaccctcccaccttggcttttcaaagtgctggaattacagatatgagccactgagcctgctgtctcctctttttattttttatttttttttgagatggagtttcctcttgttccccaggctggagtgcaacggcacgatctcggctcatcacaacctctgcctcccaggttcaagcaattctcctgcctcagcctcccaaatagctgggactacaggtacgcgccaccacgcccagctaacttctttgtgtgtatttttagtagagacagggtttcaccatgttggccaggctagtcttgaactcctgacctcaggtgattcgcccacctgggcctcccaaagtgccgggattacaggcgtgagccaccgcgcccggtctcctcttcttctaaggacgccagtcattggcttagggcccactcagtgtgatctcatcttaacttggttccatctgcaaagaccctattttcaaatagtttctcgttcacaggtaccagggttaggacatggatgggtttttccgggagactcagctcagtccacagagtaagtgggaccatttcgtggtatgcggctgtggcacactgtccttggtgcaggtgtggggctgtgtccatctttcagtgtggaccgacatgggttcaacattcaccctgaccatgaggagcagacctgaaccaaggctcagcccatgcctgggctctgtgtccagccaagctcaggcaccagacaggaaaggctgatctgggagccaggccagaggggcaggtctgttcccggcaccatagccaggccctgccccaggtcctgtcctctcccacagccccagcaggtgggagccatcaagagcctcatgcgggccgggcgcggtgccacacgtctataatcccagcactatgggaggc[269 bp omitted]gaggcaggagactggcatgaacccgggaggcagagctttcagtgaactgagatcgcgccactgcactccagcctgggcaacagagcgagactccgtctcaacaaaaaaaaagaaactcgcgcagcaattgggaaaactgaggaagctcagagacaggcagatgacccctggctctagggatgctccaccgggggttcctccccatcgccctgtggacgttcaaggctcagtcatcctctggggtggggccgccctgggcactgcagggagctgagcagcgtccctggcctccacccactccctgccagcactcagccggtcacctggcttcctctcctcctcctcctattaccccagggtggagcccagaagacacccagatggctctcagagggacacagggagcctggtgccctgtgccctggtcccagctgatctgttccccaacaagcccttcgtttctttctgggggcgtcttttgggatgcagatcctggaaggggcatggccaagggaacttcctaggtgaaagggattctgcaggcaggactgagttagaattttttttttttttttttttttgagaggaagtctcgctctgtcgcctaggctggagtgcagtggtgcgatctcggctcactgcaacctctgcctcctgggttcaagcgattctcctgcctcagcctcctgagtagctgggactacaggcacgtgccaccacgcctggctaatttttgtatttttcgta[144 bp omitted]ttagtcgtgacaaccacagatatccccacgtgttgcccagtgtcccctggggacaggatctcccctggggtgagaccccctggtttaggggatttcacggaccctcccaagaaactctgcatcccgtgatgctctgacctggtgaggtcctgggaggctgcacacattgaagtccacaccctgagcagggagagagaaaggaggtgaatcccagcagtggggttccccctggtttacgctgtctgccccatggggcgtttatccgatgtctggtgtgagcagggagaaaactcaatattttccaaataatcgacaaggggtttgtcagcctcaacagtgtggacgtttgggcgggattgttctgtgtgctaggggctatgccaacagggatggggccttggcaccctctcctctcctttcctccccaacagaggcagaatcctctctagccgaccttctccctagaccagccctggacaggcagacaggcccaggctgggggcgcgggatggccagtggcctccggagaaggggagggtcgcccacctgcctgtgtgggccgtgcctggccctgccctgctgtgggccgtgcctggccctgccctgctttgggccgtgccagcccctgggggcgctaccaggctggccacccctgccagcctcgccccctgcccccacctccacccccagctggagccctgggagggagacccccacctgccttggtgggggaaaaagcctgcctggtgggaggcaggaagcctggtccgtgccccgggtgaccgtctccttgatcctcctgcagtgtggtctgggctggggcagtgagggtgggcactagccggcccggacgtgggtgggtgggacaggcagggcctggggccaggaccgcaggtccatgaccccagtgctggtcagccagcctgggagggagctcagggttgccctgggggagcaccagagtgaagaggagggcctgggagacgctagccccagaaggaggacaaacaggaaatgaggtgtggctgcggacaggaatcagcatcagctggagccgatctctggctcctctcctccccttcctccctccttccctcgtccccttctctccttcctcctcccctcctttcctcccctctcggtccttctctccctcctcccctcctcatccttcctcctctcctcccttccaccccttctctcctctcctcccctcctctcctcccctcccctccctcccctctcctcctcccccctcctcctccccccttcttcctcccctcccttcctgccctcctcccttcttcttcctcccctcccctcctccccttccccctcctctctccttccctcccactgcagttcaacccctgccccacctccagcacccagcacccagcacccggctgcaccactaccaaatccatagctgaaaaatgcccaatgcccccagacacaaggacagagacccccactccgccaacgcactgacatccctcccactctccagtgggctccccctgctgcgttcctggcatggccaccaccctgtaccgcactgtcttgcctggccctggggtggcttggaatggcttccagataacctgggacctggccagggtgggtggtggggggcagcatctccagcaggtggcttcttttttttttatttttattttttgagacagagttttgctcttgtcgcccaggctagagtgcaatgtcaccatttcggctcaccataacctctgcctcccgggctcaagcgattctcctgcctcagcctcccaagtagctgggattacaggcacacaccatcaacctggctaatttttgtatttttactagagacggggtttctccatgttggtcaggctggtcttgaactcccgacctcaggtgatccgcctgcctcagcctcccagagtgctgggattacaggcgtgagccactgcgcctagcctagcaggtggcttctttctctctcctaaccccccgggtcccccaccctggagccctcaccaggcctaacttggggtttggccgtggcttcctcttccgggaggtcacggcagggcccagccaaggccctggggccaaggtgaacccgatcctggctgggaggtgctgcggctcctttaaggaggggtcaggacctgccctggaccctgtgggcccccccaacccaagctaggcctggtggcttctcccagggcaccccagcccctcctcacctagtcaccagctagcctcattatctgggacaggtgagagttgaccccagcccagaacctgctttgggtgcacttggagcaggccaggcccagggaggtgctgatggaatggagccagaactggccacacaggtgggtgactgacctgagggtgtggtgggtcgggggatgtgctccaggactcacctgtggctgagctgtctctgcccaatttctggctttgaccccgacgtacagcccccatggacacccagtgagcacccagtgacccgcactggagatcccagctgtctgggccatgctggccccatgcccctctcctataggagacccccagtaaacctagcttcttctctggctgacccgccactggtcccacctccctcaacctcccagggccctggcagagtggcctggagcacacagaaggttcagggatgagctcgagttccctgcaggccggccctggggtgacccagacccctgcgccacctcccgccctcacggctacttcctagggtcccacagccactgggtggcacggccttccctccaggacagggacagactcctgcttacttcctgggacaacagacgccttgtgacagtggaggccgcaccacccaccccaccatgagactccagcggtggaggcccaaaggctcagcctgccccgggtcctgcagctccctggaggcgacctgtcctgcccctggtctcggagcaggcttggccggcctctgcccaaaggtgcacagcccccgcttccttgggggcaacctgtctgcctcctgccagcctttgagcgcttcctcaatctgtagagtgattctttttgctttttttctttagttctgcagaatgcagggcgattttcagcctgtgtggcatgtagggtgtccccaaagccccagaagaggtgcccaggcaggtcctgacttgccagccctgggcttctccctccacccatctccctcaagccagggaggctggccacacagcccaccctgaccacccccgaccacccagcacagggcccggctggatgtgtgcaacaagggatcctatggggggctccattgtctggaggctttttgtttgtttgtttgtttgttttgagacggagtctcgctctgttgccaggctggagtgcagtggctcgatctcggctcacggtaacctccacctcccaggttcaggagatcctcatgcttcagcctcctgacgacctgggactacaggcgcgcaccaccacgacaagctaatttttgtatttttagtagagacgggcttttgccctgttggccaggctggtctggaactcctgagctcaggtgacccacccacctccacctcccaaagcgtgagccaccgcgcccagcaacgctcagctaattttattttcggtagagatgggggggtctcaacatgttgcctaggctggtcttgaactcctggcctcaaatgattctcccgcctcagcctcccaaaatgctgggatcaccacgccaggcccagttattcactgtttatttgccattcaaagttagcttggtgtccgtattatatcagacaaccctacgggggcggggggcggtgacaataaagacctttcccctacaacataaaaaaaaaaaaacttggtgtgggtacgagtgtgagcagatcggggcgtgtgtctgtgtgcccgcggaggcaggcgtccctgggggaggccccaagcctaggtccttgcagggtcagccatgggcccatgtgggagtgaaaggtgggggtgggctgtgcacgcctgtacacacttgcaagtgtagtgggtggcacgagagaccacctcacagttcccacctgcttggctctccagggaccagaaccacggcccaagggccatcccttgctatgaagggccgtgggcagggtcatttcaggacccctgcggggctgagagctctggccatggggccacgaggcaggaatatctgatgtaagtggccgcaagcgtcccttcttgccggctgactcacactcactccactccagtggctcggcaggcctgcctggggacacagccagggcccgcggtcctccagtgggggcagggagtgggcagggcaggtgtggcctggagcctggggctgcctacctgcccgggctgtgggtgtctggccaggagcccggggcagccatggggccatccacgctgctctgacggagtggcatcaggagcagcgtgcatgccccacctccctggggttcagcccctgcacagtccccaaggaagtgtggggcagggctggcccaggagatggccaaaggccaccgccctgccccagtgaccgtgaacaaagcactccgctgatctcctggcgtcctctcctcctcctattaccagggggtggagcccagaagacacccagatgactctcagagaaccactgggagcctggtgccctgtgccctggtcccagctgatctgtctcccaacaaggccttagtttttttgttgtttttttgtgtttttttgagatggagtctcgctctttcgcccagtctggagtgcagtggcaggatctctgctcactgcaacctccgcctcccaggttcaagcaattgtcccgcctcaacttcccaagtagctgggattacaggtgcatgtcaccacccccggctaatttttgtatttactatttagtagagacggggtttcaccat[139 bp omitted]aagggcatggccagggaaacttccaaggcgcaaggcactctgcaggtgggactgggttaggattttgagatgggagatcaccctggatgatcggggagcccagtgtcctcacagggtcctcatgagaggaggcagccgggtgagagtcagagaccggaagaggctgctcttggctgtgagtgggaaggggcccaagctgaaggatgtgggcgcctctaaacgctgggaaaggcaggaactggattctcccctggagcccccaggagggaccagccctgcgcacaccttgatgttagcccagtgaggcccccatgtcgggtttctgacctccagaaccgtgagagaatcgatgtgggtcgtttcaagccactgcacgtgtgtgattcattgcacagctccaggaggctcacacaggcggtgttttcctgagtttccactgtgcagatgagaaggctgaagccagggcagccccggtcaagccccccggactgtcacaggtcctgggaggcgccaggggcagggagatgcggctgggggcgggcgaggccctgcagcctgggcatggggccggcccagggacagggccccctccccgcagggctggatttgctgcgtcgccaaatgccggggctgatcggctgctgggcgtgtgaccccgcgcctttgaaatccgcagagccacgggtcgggccctcccgccccgcccgccgaccgcacccgcgctaggccagtccccgggcgccgcctcctcctcctcccggcggccggggctctgggcgccccccacacggtgtcccggggtgacaggagggtcggagagcacggactcgggggtccgggccgcgcgccctgggaaccccctccccggcggcggccgcgcgcctgcgcactggctccagtgccggggcccctttgccccggggacggggagaggttgccggggcaacgcgtttgcgtcagcgaacctggcgcggcgcccgggctcagagggcgagggaggcggggcccgggctctggaccagtaggactccaaatatttagtgtgggggcgtggccagagatcacgctccagccaatggaattgttgttgtcggggccgcgcgatcagggccttgtgcctcttaaagggaccgtgcgcattactccacacttcgctcgccgctgtgttctgggcggaggcctagggctcagggttgggggtcagtgggcctggctgggggcagaggtaagggagggcgcagactcggagttggaggtcagcgggccgggcccagccccacgtcctcctgttttgcccgtttgtgtgactctgggtccggtctcggtctcccgagcttcagtttccgcaggtgcacagagctggagttgcggagttgtgggcgcgatgcattcacggctactcctcccctggcgggcgcccctgcatttatgcagcgcccacgttttgcactagcaccctatgcaacgaccggtctctctgcaggtcacagaggagctggggggggttgggggaccccagaaggtgaccaggcctggatgaccaggactgaaccgcaggccttggccctgcaccaacacctcttcctctgtggccaggaaacattccttccaaggacccctactggagggggtgggagggttggtcccccaggtcctccaggtcccgggcgctgtgcaactgagtgaaagcacagaggcaggtggtcagaatctgacccccagcggccacagccacaacccctcaccccaggcaggcctcactctccactgtagccctgatcaatgaatcacaagtgaggggcaggaaacgagattgaaggacccacggtgtagacagcaggggaggtgaccccaccaacccacccatctggcaccctctacgtcccaagtctggagtgtcccagtggcagccctcagggcatggataggctggaggcccggcacccctgccgaggctagcctagaagaatgggggtggcccctttggccatgggaagtggtacattcacagatcgcgggaatgacatgggcatctttgggggctgtgattcagccgaccacagagtgtctcaggcttcccccaaggatcccatcttcaccatgtaccgccctcctgctgggaccttggggtctcctgtctgcggccagcccaggaccctacgagttcctcattcctgcttctctcaggagagaccttttaaaggtctgcatttctctttgacttttttttccgcaatagttttcttcattatagaaatacacacgcagcctcactctgtggcccaggctggagtggagtggcacgatctcagctcactgcaatctctctccgggttcaggcagtcttgtgcttcagcttccccagtagctgcacggagacacccagctaatttgttttggagacggagactcactctgtcgcctgggctggagcgcagaggtgcaatctcagctcactgcaacctctgcctcctgggttcaagtgattcaactgtctcagcctcctgagtagctaggattacaggtgtgcaccgccacacccagctaatttttgtatttatttgtttttattttttatttttttgagacggagtctcgctctttcgcccaggccggagtgcagtggcgcgatctcggctcactgcaagctccgtctcccgggttcacgccattctcctccctcagcctcccgagtagctgggattacaggcgtgagtcaccgcgcctggcctatttattttttgagacgaagtttcactcttgtcacccaggctgtagtgcaatggtgcgatcttggctcactgcaacctccacctcccgggttcaagcaattctcttgcctcagcctcccgagtaactgggattacaggtgcccgccaccacgtccagctaatttttgaatttttagtagagacagcgtttcaccatgtgaaaggc[134 bp omitted]cagcttcccaaaatgctgagattacaggtgtgagccacagcacccagctttattttattttttttgagacagggtcttgctctgttacccaagcttaagttcagtggcctgatctcggctcactgcaccctcgacttcctgggctaacgcaatcctcccacctcggcctcctgagtagctgggattacaggagagtgcctccatccccatgtaatttttgtattttttagtagtgacggagtttaaccttgttggtcaggctggtcttgaactcctgacctcagctgatctgcccatctcagcctcccaaagtactgggatcacaggcctgagccactgtgccggccgctattgtcgtttctgagtgacatcatcttggcgatggttttgatttgcatttccctgacagcttgtgtgttccgtcttttctcacctggatgttgaccaacacgtgtgtaaatgttcaagacccacatattttaaaaagtaaaaagaaacagatgacattggctgggcacaacatggccaacgtggccaaaccccatctctactaaaaatataaatattagccgggtgtggtggcacgcgcctgtaatcccaactactcaggaggctgaggcaggagaatcacctgaacccaggaggcggtggttgcagtgagccgagatcgcgccactgcactccagcctgggtgatggagcgagactccgtctcaaaaataaaataaaataataaaaatagaatcttaaaaattgcccgtccttctgaggcctcctgcacagtcatagcgccctgtggccccgcggccaagcgggaggagcaggcaggggaggttgcttccaggacgccaggacactggctgcaggtggagagaaacaggaggggcggctgtggtgagccggggctggcatccacctcctggcgacgcgacctaccagggaccttgccaaggggcctcagtcagccttctgttgatgacacgctgaggtcaggaccagggccacagcctgtgtctgacaagaagcagtttccagttatttggtgaatcagtgctgggggcctggcctgaggggtccagggagtcacacctgactccatgtccctctttcccacaaagtaggagagcgccatgggtcacctgcccgaaaaggcaggtccatcctctgcctgcagtcagaactcagggggatccctgaggccggcagcagagccacgaggacgcagtggcctggcggcgggtggggcagcgcgggagctgctttccaggccagacagacggagccgttctcctgccggccttcccgggagcaggatcccatccagtgatgcgtaggcctgtggcggggacaaggagggcgggcagctgcttttgtttcccatctgcttctctggcttggaaagaagggcagacagctccagaaatatcgaggaacgtgggccacgcctccggggcggccaccaggcggtggcaccagaaggtcagcagagacagagcataaacagcagccacacaagacacccacgcgggacacgggccgtgtgcgcacatgggcacctgatgcctggtggccgagaggacagcacggcctgaacacccggcaggaggggacggatggtccatccacactggaacattatcccatgacgaaccggagccaggccacagcgtgaacctggaggacatcatgctcagtcacagatgccaaactcagaaggccacgcagtgtgtgatcccatttctatgaactgtccgggacaggcccatccagagacagggaggggatgtgtgggtgtcggggagtgacggctgatggggacaaggtttgttcttctcgaggtgatagaatgctgtagaattggaggtggtagttgcacacttttctgaatgtactacatgcgactgaattgtacaccttaaatg[143 bp omitted]atggcgaaacccagtctctactaaaaatacagaaattagctgggtggtggcttacgcctgtaatcccagctactcaggagggtgaggcaggagaatcgcttgaacccaggaggcagaagttgcagtgagctgagatggcgccattgcactccagcctgggtgacagagagaggctctgtctcaaaaagtaagtaggccgggcgtggtggttcacgcctgtaatcccagcaccttgggaggccaagggacgcagaacacaaggtcaggagttcaagaccagcctggccaagatagtgaaaccccgtctctactaaaaatgcaaaaattagctaggcgtggtggtgggcgcctgtagtcccagctactcgggaggctgaggtagagaagtgcttgaacccgggaggcagaggttgcagtgagccaagatcgtgccattgaactccagcctgctccgtctcaataaaaaaaataaaaaataaataagtacatacataaaatgtttattaaatcatttaccatgatttttaaatgttaatttgtattttatataatgtatttcagcacatgaagttttctgactaacgtatctt[243 bp omitted]cggcctcccaaaattctgggattacaggcgtgagccaccgtgcccagcctgtcccatatacatttggattcaccttgatcattaagactgcaattgctggccaggtgtggaggctcatgtctgtaatcccagcactttgggagt[136 bp omitted]gaggcagaagaatcgcttgaacacaggacgcagaggttgcagtgagccaagattgtttcactgcactccagcctgggtgaaagagtgagactctgtctcaaa[132 bp omitted]aaccctgtctctactaaaaatacaaaaattagccgggggtggtggcaggtgcctgtaatcccagctactcaggaggctgaggc[168 bp omitted]ctggctgggaacaatggctcacatctacaatcccagcactttgggaggccaaagagggaggatcgcttgaggccaggagtccaagatcagcctgagcaatgtagggagacttcatctctacaaaaaagaaacacaatcagctaggcatggaggcacatgcctgtaggcccagctactcaggaggctgaggcgggaggattgcttgagcccaggaagttgaggctgcagtgagctgtgatttgtgccactgcactccagcctaggcgacagagcaagaccctgtctgaagaaaaaattatatatatacataaaaactttgcctaagcttctgcttctgccagtctatgtctttgttacagcaattttatggggacatagttcacatctcataaaattcccccactaatgtatacagttcagggcggtgcggtggctcatgcctgtaatcccagcatttcgggaggccaaggtgggtggatcacctgaggtcaggagttcaagaccagcatggctaacatggtgaaaccccgtctctactaaaaataaaaaaattagccaggtgtggtggctggtgcctataatcccagctactcaggaacctgaggcaggagaatcgcttgaacccaggaggtggattgttgcagtgaactgagactgcaccactgcagttcagcctgggtgacagagtgagactccgtttaaaaaaaaaaaatgtgtatagttcagaggtatttataaattcatggagttatgcaaacattatctgaaaagaaaatgttttgtgttgatttttactggatatgaggggttcttcacattttaacaggaggatctttctgtatatttttgtttgtttgtttttttgagatggagtttcactctgtcacccaggctggagtgcagtggcagt[175 bp omitted]ccaggccatctttctgtgtatttctataggcgtccgcaaactttttcttttttcacttgatactcacctcaattaagagcagggatatttacatatgatcagtttattttttttcctaacactatttattgaaaatctttcaatgtcagctctctctccccacctcccccgctttctttttttctgagacagggtcttgctctgttgcccaggctggagtgcagtagtgctatctcaacttactgcagcctccgcctccagggcttaagtgatcttcctgcctcagcctcctgagtggctggaatcacaggtgcaccatcatgcctggcttggtcaccaaacttttactgtaaggggcagactgtcaatatttttggctttgtcgggtgcggtggctcacgcctgtaatcccaacactttgggagtccaaggtgggtggatcacgaggtcaggagttagagaccagcttggccaacatggtgaaaccccatctctactaaaaatacaaaaattagctgggggtggtggcgggcgcctgtaataccagctgctcgggaggctgaggcaggagaatcgcttgagcccaggaggcggaggttgtagtgagctgagatcacgccattgcactccagcctgggcaacacagcaagactccctttaaaaaaaaaaatggcactgtggagcagatggtctctgttggttaactctacagccacagacaatatgtaaataatatgtaaatgtatgagcatggctgtgcgccaataaaactttatttacacaacagactgtgtggctggcctggcagggtggctcacggctgtaatcccagcactttgagaggctgaggcaggtagatcacttgaggttaggagttcaagacttgaggtcaggagttcgagaccagcctggccaacatggtgaaaccctgtctctgctaatatataaaacattacccaggcatggtggcttgcacctgtagtcccagctactggggaggctgaggcaggaggctggcttgaacctgggaggtggaggttgcagtgagccactgcactgtagcctgggtgacagagggagactccatctccaaataagtaaaatttaaaaccacattgattttgggaggccgaggtaggcagatcatgaggttaggagttcaatatcagcctggacaacatggtgaaatcccgtctctactaaaaatacaaaaattatccagtcatgctggtgcacacctgtaatcccagctacttgggaggctgaggcgggagaatcgtttgaacccgggagggagaggctgcagtgatctgaggtcgcatcattgcactccagcctgggcaacaagggtgaaactccgtctcagaacaaacaaacaaacaaacaactaggaaacagcagcctctctggaaggcggttcccgatccccgctctttgcctaacaggagcctgtcccttcccagcgccgtggtgccctctaggggcgaggtgcagcagcacagcgctgacgggcacagggctaagggtccaccctgtggggcccgggctgcccctctctgccatgctgctgaggtgcaaaataccaaattcgtgagccaaagctggtcttccgttaggctccggactcacgacgtttcacgctggaagggaccccggagactcactcacccaatgcccacatttttcacatacagaaaacaaaaagcagctgggcacagtggttcatgcctgcaatcccacacttgggaggccgaggcagggggatcgcctgaggccaggagttcgagaccagcctggccaacatggtgaaaccctgtcactaccaaaaatacaaaaattagggccgggtgtggtggctcacgcttgtaatcccagcactttggtaggctgaggcaggagaatcacttgagcctgggaggccaaggttgcagtgagccaagattgcaccactgccctcctgcctgggcaagagtaagactccatcttaaaaaaaaaaaaaaattagctgggcgtggtggcgggcacctgtagtcccaattccttgggaggctgaggttgcagtgagccgagatcaggccactgcactacagcctgggtgacggcgagactgtctcaaaaaaaaaaaaaaaaaaagaaaggaagaaagagaatgaaataaacaagtcaataaaaagttgtagtgtacgctaatttgtccatgtccaaggccacagcgggctagggagtcacgggctggcctggactccaccccttcggtcttttccctctgatctgttccttggcacagggtaaaaacttttgtgcttcattttcttttcttttctttttttttttttttgagacagcgtcttgctctgtcacacaggctggagtgcagtggtgccatctcggctcactgcaacctctgccgccagggttcaggcaattctcctgcctcagcctcccaagtagctgggatttaaaaaaaaaaaaaaaagaaagaaagaaagaaagaaagaaagaaaagctgagtagctgtctaaaaaaaaaaaaaaagaaagaaaaataaaaaagattttctcagccccaaagcctgaggctcacccctaggacagggcaccctgttaacactggcaggaaaacgacaccatttattccgacgtctgcgtctgtagttttattccgtatctggctgggggagggtggtctccgaggtggatggagtgagggtggaggggacagagatggtccctgctcccacctccccgagcccacctgggaagctgcgtggccgggctgctggagacatcccgagccctgggggagacagaggtgtgggtgtttgggcttcatcttccaggtacaaggagatacatttcatcaagcagttcctgatttcatggagttctttgagggctcggctgggaggtccctctccggggggctccaagtgccggacctggtggtttctggaaggatcaaggacaagtcctgggagtttcaggcttcggcagtaacagtgtgttaattgcacttgttcgattttctggcagaagccaggagagacggggacagcgtgcttctcttcggtgaccatcccaggcgcccagaggtgaccagacttctgtgtggtctgggacagtgcagggctcaggcaggaaggaccactgtggtgaaaggccactgacaattctggtgaggagtagggtggcaggggttcagccagggagaggaggtggctgccttttctcagggccctgctctcaccttccaaaggtctagggtacacagaactcatggattttggtctcgcagccccaggggccacacagaaaaaggggttcaactggaagtttgcagcatctgggaaaggccaattctggcagaactggaagattccagaccaggggagaggcgtccagggagagaagagtcctgcttgggttgatcataagcaaagtggacatcgttccgaag[136 bp omitted]cggtgaaaccctgtctctactaaaatacaaaaaaattagccgggtgtgacggtgggtgcctgtagtcccagctgctggggaggctgaggcaggagaatggcgtgaatctgggaggcggagcttgcagtgagccgagatcccaccactgcactccagcctggttaggccgggtgcagtagctcatgcctgtaatcccagcacttttggaggccaaggtaggcggatcacctgaagtcaggagtttgagaccagcctggccaacatggtgaaatcttgtctctactaaaactacaataatttcctgggcgtggtggcgcacacctgtaatcccagctacttgggaggctgaagcaggagaatcacttgaacccaggaggtggaggatgcagtgagccgagattgtgccactggactccagtctgggcgacagtgggagactccgttcaaaaaaaataaaaatctcaagatggttgtaaatgtgactataaaaatcaaaccctttatgatacacaaaggggcccttaggaaatgagtcagaagccggggtgcaggacgtggggtcccaggagtccaggaagccctggatacagtcagctgaatgtttcggaagaacggaagaagcagagtgcattgaggaagagagagggctgggtgcggtggctcacccctgtgattccagcactttgggaggccgaggatggaggatcactggaggccaggagttcagcgagacccctgtctctagtatgaccaaaaaaaaaaaaatctgtagaaaaatggaagagattggggagggaggaaagaggctgcctgggtccaggttgtgcctctgtgtgaagagacaccagcggctgccagtggggagtgcggagtaaaggcctgcgggaggagatgtccgctctcaggggctcggaagcccctcagcctcttgcctccccaacgggagacatgtaggaggccgagcaagctgggtgcccttgagagacaggcccaggcagggctgtggccacagcagccctgggggctccccagcgaggtggaggcagaagttccaggagcctgggagccacccagggcaaggagtgaccctggaagccatccagcctcctggaaagtggaagtggtttaaaaacacagtgggcttttccggttgctagtaacacatagaattacagagttcacgttttagtcccagacgggagactgaggctcgagactgaggaaggcatctgccgtccggggttggagctcctgaggaccaacacctgctcagcggctcggcccctggtctccctgagatgctcaggccggagagaagcgggatgatggttccagagcgtcctcctccaagtctccgaggccccagcggcggttcgggcaccgggagacccgcggggctctcagtggcacatccgggcggtcatttctttctgtaaagagcaagcaagacatcagctcccaccagccactcctaaaaggggtgatgcgaacagcagacacacggagacgcacaggcagagaaacggcagctgggggcttccctgaacacccaaacaacaaaaaccacacaggcaatggcacacctgagaccaggggcagcaggctaccccatgaggccagagagtcagcattttcagatctgtgggccagacggtccctgtcatgatggctcaactctgtcttgtacctcaaaagccacctcagacgatggtaa[137 bp omitted]cacggtgaaatcctgtctctactaaaaatatagaaattagcctggcatggtggcaggcacctgtaatcccagctactcaggaggctgagggaggagaatcgcttgaacctgggagacagaggttaccgtgagccaagatcgcgccactgcactccagcctgggtgacagagcgagactct[169 bp omitted]gagggaggggaatcacttgaacctgtgaggtggaggttgcagtggctgagatcaaacaaacaaacaaacaaaaaaaccccagaaactttatttacaaaaacaggaagccaggccagagggctgcagtttgctgatccctgtcttatacagactgggacactagaaggaaagttctggaatacagaaaaaaagaaaaagaaaaaagaaaagaaaaagaaagaaaaaagaggaagaccccactaccatctttagagccactgagtatgcaactattaattttaaatttagcaaaatgtttaccagtagcaaagcctgaaaggggatgcacaaaaatgaggaagttatgtgaagatgtttttagtctttttttttttttgagacggagtttcactctgtcattcaggctggagagctgtggcgcaatcttggctcactgcaacctccacctcctgggttcaaacgattctcctgcctcagcctcctgagtagctgggatcacaagtgcccaccaccatgcctggctaatttttttttttcccctgagacagagtcttgctctgtcacccaggctggagtgcaatggcgcgatctcagctcactgcaacctctgcctcctgggttcaagtgattcttctgcctcagcctcccgagtagctggaattacaggcgcgtgccaccatgcccagctaattttttgtatttttagtagcgatggggtttcaccatgttg[132 bp omitted]tactggctgtcacccaggctggactacagtggcgtgatctcggcttactgcagcctcaacctcccaggcacaagcaattctcctgtctcagccccctgagtagctaggaccacaggcacgcaccactgtgcctggctcatttttttcattttttgtagagatgaggtctcactatgttgtccaggctgttctcaaacttctgagctcgagtgattctccctctttggcctcccaaagggctgggattactggtgggagccacctcgtccgtccatttttaaccattttttaaagttgtaagagagtggtggctcccacctgtcatctgaatactttgggaggccaaggtgggaggattgcttgcatccatgagttcagaccagcctgggcatcatagtgagaccccatctctacacacaataaaaaatcagccgggcgtgctggctgtggtcccagctactcggaggctggtggggtcccgctctcacatcaggatccccacatccatacagcgcccagcagcctggggaacaatgcagcctctgggcaggttccagtgccaggccctgaatcacgggcacccactccactgctggtccccatcaccgagacacaattgtgggccccaatttcaagaagcaacattggcttcagggatgtggaccccacaccgaggaatctggtccctgggttcgtctcccgataaaacctggtaacgtggaaagcagacaggctagggcagatgcagaggtacccggctggctacagaagtcgggtggaatctaggcaggtgcggtggctcctgtctgtcattccagcactttgggaggccgagacagggagatcacctgagttcaggagtttgagaccagcctggccaacatggcaaaacctggtctctactaaaaatacaaaaattagcggggtgtggtggcacgtgcctgtaatcccagctactcaggagactgaggcaggagaactgcttgaacccggaaggtgggggttgcagtaagccaagatggcgccactgcactccagcctgggtgagggaggcagactccatctccaaaaaaaaaaaaaaaaaaaaaaaggccaggcacagtggctcccgcctgtaatcccagcactttgagaggctgagatgggcaaaccacatggtcaggagatccatcgagacaatcctggctaacacggtgaaaccccctctctcctaaaaacacaaaaaattagctggacgtggtggcgcgtgcctgtaatcccagctacttgggaggctgaggcaggagaatcacttgaactcgggaggcggaggttgcagtgagccgagatcgcaccactgcactccagcctgggtgacagagtgagactccgtctcaaaacaaacaaaaacaaacaaacaaaaaaagtcggggtggagtctgcttgtgccggctcgcatccctttcataagggacactgagcggcgctctgggacacctgagctcaggacggtgaaggcggagtgagctggacgcggggcggcgcggaggaaactgcacctgtcgccggcatttgttccgtgggagaacgcaggatccctcccagctacctcaccacttgtcccatcagcagggtccccggggcccaactccagccggggccgccagctgctgggccgaccgcaagcagtcagggtcctggccccggaagggttcctctgccacgggccaccagccccaccgtaaccgcacgccctcagccccaagcccgcgcaccagtggctccagctccttggtgtcgatgaggccgaactccttgacgaaatagtagaagtgcttgtagcaggtgttcacgtgggcctcggagcccatctgcgcgatgcggtcaaagtggtggatgtagacgtgcacgaacacgcggaacagccgcgacaggatcttccgcaccgtctgcaggaagttcttgggaaacggagtgcctgcagggagaggggtgggacgggtccacggactcagccaagtccatgtccagaaccctttgctcctggatgt[135 bp omitted]gaaaccccatctttactaaaaaatacaaatattagccgggtgtggtggctcatgcctgtaatcccagctactcaggaggctgaggcagaagaatcgcttgaacctgggaggtagaggttgaagtgagccgagatcgtgccactgcactccagcctgggtgacagagtgagacactgtctcaaaaaaaaaaagaaaaagaaaagaaaagaaaggtacgctgtactctggagggacgtgccctaatgatcatcctcaaacccacgtttatggggtgtccctgagagccatgcagtgcattacacatcgagctgggcagggggtcccgccaacggggtgatgatcctggtgggcccaggggctccatggcagtgattctgaaaccactgagaacactgggcccagcactggcaggggtgcttgtctcctctgcgaaggactccaggcctgatgctgatcctgtcattctctgctttggggtgaggagacaggagtcaccaggagtgattcaggatgaaggggggctactaagagcagcccaacttaggagaatactcagaaatggaatcctttttttttttttgagacagggtcttgctctgtcacccaggctggagtacagtggcacgatcatagtttactgcagcctcaacctcctagcctcaagcgatcctcccaccttagcctcccgagtagctgcgaccaaaggcgtgtgccaccatgcctggctaatttttaaaattttttgtagagatgggatcttgctatgttgcccaggctgagctcaaactcctgggctcaagcgatccctgggctcggcctcccaaagcgctggcattacgggtgtgagccactgtgctcggcctccctgacttttctggaaggctctgtatccccgagcccctgccagctctgactcaccaacgttggtggggaagaggtcctcgttgttgatctgcgcctcgatccagtccatcagcaggtccatgtacctgggcgcggagagtgccgtgggcttccggaacttatgctcatcctgccagcggtactcatacttggggccccccgacatgacggggcaggactgctccgtgcagccgtcgctgatggtgccgtagatgaggttgacgcggttaaagaagtccaccacgtgaacagccacccagtcgttcaggtcctcgcccgggggcaactgcacggccagccgcaggtccagcccggcgttcagcgacgcctgcgccttcttgtgcagctcgaagcgctgggtgcctggctcaaacttgcgcttggggcggaatgtcttgtccttgttgaagacttgcttcaggaaggggttggacatcttggtgacgcctgctctcctggacttctgtagaggggtcctgggccagctggctgggggtgctgaccaacccgagaggccacgaaacactcaccaagccccacagctctcccgcggacctgaaatacacaggggaatcatgacctgctggaggcgacagaatttcccggaaactcgtgctgagggcacaagcggcaggattttgttttgttttttgagacagggtcttactctgttgccccggctggagtacagtggtgccatcacagctcactgcaacctctgcctcccaggcccaagcgatcctctcaacttagcctcctgaatagctgggactataggcacacaccaccacacctgggtaagtttctttatttttagtagaaacgaggtctcactatgttgcccaggatggtctccaactcctgggctcacatgatcctctcacctctgcctcccaaagtgctgggcttacaggtgtgagccactagtggcagggttcaaaacatcccctggacttttgactttaaggagtttcacccaaagggggccacctcctcagtggacagaagagaactgcgcgtggcgaggcctgaccgattcacagcagaaggtgcgcagagccgggccccaagagcccgcaggggccgcatcttccccggtgccgatgcctggcccggacctagacttgctgctacccagcactgtggggcttgagtgtggggcaggctgagatgccagtcacaggggactgcatggccggactacggcctccacaaaggaagccacaccgcaatgcccgcagcctgtgcatggcagcctaggtggaagaaggtctcaagggacgtcatcttggattccttgggtggccccacagtcagtgacaaacatcctcaggagtgaggcagatacgggggagacggctgtgcgaggatgcaggcagagatgggggtgctgcttccacaagcgaagggtcgcccaggatgctggccaccgccaggagcagagagaagcctggcagatgcccctcggcctcagagggacccagccccgcccacaccttcgtctcagacgtgcagccccagaactgagaatgagtccctatcgtgtcagcattctccccatgttgctgtgcccaagtcactggtcactgggtcagggaccccacgattgggtgacccctcttcccttgatttcatccacaaagacccccttccaggtcgggtcacatggcgagatgccgggtgattccaggggcagctgtccaccccaaggcaccgtataaatgaggaagcctccaggagccggcccaagtctcatgcacgcctgagcggtgacttgtgagacacccacgggttgctctggggtggggacccggcgtcctcctactcccctgagaattctcaggggacagagacagagtccatcccgcacagggcggaggggcgacctggatcacacaccgcgcgtgtgccgggctcacgctcaccacgcagggcctgtcaccgccaacaccgttattgtcactgccaggacgccggcaccgtggcaggcccagagtggatgcagaccccaccctgctctgctgggtgcaccttctggacgggcagagacttgactgtgacacttggggcaaggcccacgcagggtgctgggcagggcgggggtcctcaccacagcatgaagaggacccagcagaagggggagtcagagaggggagagggagtgaggcccacacatgcccaggcctcctgggctccacgcaacgctcacaagtaataaacacacattcatcacgttctagtacattccaacccccacctctttttttttttgaggcagagtctcgctctgtcacccaggctggagtgcagtagcgcgatctcagctcactgcagcctccacctcccgggttcacgcgattctcctgcctcagcctcccgagtagctggcactacaggcacgtgcaaccacacccagctaatttttgtatttttagtagagacgggttttaccatgctggccaggctggtctcgaattcctgacctcatctgatccgcccaccttggcctccaaagtgctgggattgcaagcgagcaccaccgcgcccggctgtgttgctgttgcttgtgacgaagtcctgtcttgtgtctcatccctcacgatacatgactgggcgagtgtttggggctgccatcacaaatcaccacaaatttcaggctgaaaacaacaccaatctagcacggggaagctctcagctgttgggaatggatcctgcagggctaaatttaaggtgtggacaggccgggtgcagtggttcacacctgtaagtactttgagagggtgaggtaggtagatggcttgcgtccaggagtttgaggtcagcctgagcaacatggcaagacctcgtctctacaaaaaaatttaaaaattagctgggtgtagtggcgcatgcctgtaatcccagaactgaggtgggaggactgtttgagcccgggagttcgaggctgcagtgagcctcgaaccccagcctgggcaacagagtaagaccctgtctcaaaaaataaaaaataaggtgtgagcagagctggatccttctggaggccccagggcttagggttagggtaccccccaacagtcaacagaacggcccccaccagagaatgatctggacccaaatgttcacagggcctgggggtcggggggaagagatgctgcattgtttgg[131 bp omitted]tctactaaaaatacaaaaattagccagacatggtggcgggcgcctgtaatcccagctactcgggaggctgaggcaggagaatcgcttgaacccgggggacaaaggttgcagtgagccgagatcacaccattgcactccagcctgggcgacagagcgagattctgcttcaaaacaaaacaaaacaggcctggcgcggtggcccacgcctgtaatcccagcactttgagaggctgaggcgggcggatcacgaggtcaggagttcaagaccagcctgaccaacatgatgaaaccctgtctctactaaaaatacaaaaattagccaggcgtgatggtgcatgcctgaaattccggctacttgggaggctgaggcaggagaatcgcttgaacctgggaggcagaggttgcagtgagccaaggtcgggcctctgtactccagcctgggtgagagagcaagactctgtctcaaaaacacaacacaacacaacacggtgcccactgtgaacgcagtgacgacagagtctgcaccataagaaggtccagggtcaatggtttgtcacaagggagcccctggtgaggaccggctgggggacactgctcagggcagcctgggcacaggtggcaggaggacttgagtcccacccacgctgcagtgaccagaaaggcctgaacttccccagcccatcctggggcccttagccaccatcgtcacttcctgccaccagggttaacacccaactaggaacttgaacttttcatctgcctgggacaaaaaccctgtctccactttacagatgagaaaaccagggcccagaaaaccaggcctctaacccctggctctgtggacatcggggttggatcgttctctggggtggggccgtcaggggcactgcaaggtgctgagcggcatccctggccgccgcccctccctgccaggagctcccccaagttatgacaaccacagatgtgcccagacatcacccagtgtccctttgggttaagattagatcgccctgggtgagatcgtggctcagatgattatgactgattctacagcagtgtctcacgccacagagctagtgggtggatcggctggggctcgaaccctggactctgtgggtggatcggccgggtctcgaaccctggactctgtgggtgaagccaccgctctttctgccccacaactccctaaattcagcaactctcagggatgcaggcagccgtctgatcacaagcctagtgacacacgcttcccgggccagcgctgctccaccacggggcccctccactgcctagcagagccacgtggatgctccaagtccagggactgctgacccatcttggttttgctcggcggggcacaaccccagggtcaccacacaggtccccccgcttgcttctcttccatttttagagacaggttctcgctctgctgctcaggctagagtgcagtggcaggatcatggctcacacttcagcctcgacctcctagctcaagggatcctcctgcctcagcctcctgagtagctgggaccacgggcactcactgccataattttttataattttttcaccaccagttaattttttgttgttgttgttgtattttttgtagagacgggagctcactatgttgcctaggctggtcttgaactcctggactcaagcgatccatccgccttagcctctcaaggggctgagatcactggcgtgagccactgtgcctggccacccctgcctgcttcccaaggaaggagtaatcccgcagcccagcctcagaccctccctgggaagcccctgattcaaagaggccacctctgtgcttatggtatcccccggggccggggagcccgggacgcatccacgctgtggctgagcaggtgggagctgttgggggggacctgaggcccttcgccagtgacagctcagcaccccagagccctgcacctgccccagtgatgagctctgcaagccacacctgccctcaggccacaccacctgcagcacaagatcaataaatcccctcaggagaagggaaaatgccggccacctccaggccatggtccgcctggcactgagcgagatgctcctccacgctgggaatcaatcacctcagtccccacatgcctgtctagatggggcgagtgcaggccccactttaccaaagaggaaaccgtgcaggcgagcagatccccatccacccagccaggcccactcacctccctcctccccgtttccgcttcacatctgggccgactcacagccaactttccaactccaacagaaatcacagcacagagcaaaacccaacctgccacagcctggtgctgccgtttgttgatttcagggcctcccatgccaatttgggggcttagcttccaaccgtgccacctggttgggcaggcggggccttccagcagtggtattgcagccctgggctgactgcagccatgggaggagaccccctacctgggctgagcctcagggagaaagcggctgttcccacaggcccccgcttgtctttttaaaactttttgtagagatagggtctcactacattg[135 bp omitted]gactcacaccaagacagttccagaaaacaagacagggcagcccgaggagcttgtaaacttcctcttggcatgtctgtctcctttcagaaggtgaggggtgccaggcgaggtggctcatgcctgtaatccctgcactttgggaggccgaggtgggtggatcacttgaggtcaggagttcgagaccagcctggccaacatggtgaaaccctatctccactaaaaatacaaaaaactagccgggtgtggtggcatgtgcctataatcccagctactcaggaggctgaggcaggagaatcgcttgaacccagggaggcggaggctacagtgagctgagatcacgccactgcactccagccctggtgacagagtgagactccgtcacaaaaagaaaaaggtgcaggattttcagtggaagttaacatcttctgaagaaccttgtggactggcagagttcccgtcacagcagacggttttttttttcctttttattttttttgagacaggatcttactctgtcgcccaggctggagtgcagtggcatgatcttggctcactgcaaactctgcctcccaggttcaagcaattctcctgtctcagcctcctgagtagctgggactacaggcgcccgccaccacacccagctaatttttgtacttttagtagagatggcgtttcaccat[137 bp omitted]cctaggctgctctccaattcctggcctcacgcaatcctcccacctcagcctcccaaagtgctgggattacagacgtgagccaccatgtccggcccgagcaaagcgttttctatcaggaacaaacacaggctccttggcggaggggtgattggccacagaaaggggtcttttccaaagaaaggccggggtggcctcgggaccctgactcccgccctcgttgtcccctgaggccgggggcaggttaccgtgtctggggctccctccgctctgctcttctcggattcctccaggaacagtggagaagacaaggcaggaatcagctctcagaattccacaccaaggccttctgggctcccccggtcttcccacggacgagacacaagtgacccttggaaacttctagagaaatgaaaggtgaaatgacaaattcccctgctgcaacactttttttttttttttttttgaacaacacagtttctctaagcaaccaactggtatgacccctcccccaccgaggtgtagcagctcacggaccacagtcacccacttccttccggaggtttccacatcctgccactgcctcggggaccgctgccccagagcacgggaggcgcctgagagacaagccctgagtggagaagtcagttccatatgttctaggtcagtgcacaacactggctcccggcctggcagcccagccctcatacttggctggaagatgctcccagcccagaatctgtcctgctaaaaaaggcgctgggcgcggtggctcacgcctgtaatcccagcactctgggaggccgaggtgggcggatcacaagatcaggagatcaagaccatcctggctaactcggtgaaactcgtctctactaaaaatacaaaaaaatagccgggcgtagtggtgggcacctgtagtcccagctacttgggaggctgaggcaggagaatggcctgaacccgggaggcagagct[135 bp omitted]ctttcatttatttatttttttgagacggagttttgctcttgttgcccaggctggagtgcagtggtacgatctcagctcactacaacctctgtctcccaggttcaagcgattctcctgcctcagcctcccaagtaacagggactacaggtgcccgctacaacgcccgactaattttgtatttttagtagaggtggggtttcg[136 bp omitted]tttttgaggtgaagtgttgctctgtcacccaggctggagtgcagtggcgtgatctcggctcactgcaacctctgcctcctgggttcaagcgattctcctggtcagcctcctgtatagctgggattacagacacacgccaccatgcctgcctaatttttgtatttttaggagaaactgttcca[140 bp omitted]ctggtaggccaccctcactcctgctggaggatggctgcgtcttccctgatcacccaggcgtgcatcctgtcactgttttgtgcttttgtctggtttacatttttgttttttttagagacagggtcttgctctgttgcccaggctggagtgcagtagtgcaatcacagctcactgcagccttgacctcccgggctcaagtgatcctcccacctcagcctcttgagtagctgggactacaggcacacaacaccacacctgtataatttttgtatttttgtagagatggggtcttgctatgttgtccaggctggtcttgagcttctggagtcaagcgatcttcccacctcagccacccaaagtgcagggattacaggtgtgagccactgtgcctactgcatctctgacttctctcgtgggaaagcagacaggcaggaagcaaggcctgcccaggcccctctgggccaggtgctatcgagggcttagcatactgtcctaattctcctgatagtcttttcttctgtttttagattgacatatgactcacatcccacacgttttaaccttttcagttacagttcaggagtacagttacgtgactcctggcacgtttggcgttgcgcaaacaccacctttatctaattccagaacactttcctcacccctaaaagaagccctggccagctgcagtggctcacgcctgtaatcctggcactttgggaggccaaggcaggaggactgcttgaggccaggagctcaagaccagcctgggcaacatagtgagacccatctctgtacgaaatagttaagaaattagccaggcatggtggatgtgcctgtatagtcccagccacttggaggctgaggtgggaggattgcttgagcccaggagatcaaggctgcagtgagctatgattgtgccactgcactgcagcctgggggacaaagtaagaccctgtctcaaaacaaagctaagatcgtgtcacctaggggacagttacagtgatgagacgtcacggacacctgtggtgcctgcttcagaggactcagcccaaagtttcaagagacaagagaccaagtgtcagaaagaggaagccacagggaggaacgccccaagctaccatcccaacccagggccacactcctttcacggaactttttcctaacccagggccgcaggatctgggcttgactgggcaccaccgacttggcaccgccttcttggcctcctggatggcttcagtctgaacgtgggggcaggagccatgctctgagcccgcccagtgggagccaggggcccaccccagtctcgcctcctcgtggccactgtgaagagctctcagccacactcagctgcagtgggggtctcacctggggggcgattctgcaccccggggactcatactgggtgatgtctgggggcatttgtggttgtcataactggaggatgctcctggcacagagtgggtggtggccagggatgctgcccagtgccctgcagtgcccaggataccccaccccagagactaatcagccttgaatgtccacagtgccgagggggacaaagcttgtcctgcgagtggcaaggccggggatctaactgttcttgtttgctttattttattttttgagacaaagtcttgctctgtcatccaggctggagtgcagtggcacaatcacagcccactccagcctcaacctccggggctcaagcaatcctcccacctcagcctcctgcgtagctgggactcctggcgtgcgtccagataatttttctattttttttcttttttgagatggggtcccgctgtgttgcccaggttggagtgcagtggtgcgatcttggctcactgcaacctccgcctcacgggttcaaggattcttctgcctcagcctcctgagtagctgggactacaggtgcgcaccaccacacccagctaattttttttgtatttttagtagagacagggtttcaccatattggccaggctggtctccaactcctgacctcatgatccgcccgcctcgacctcccaaagtgctgggattacaggcatgagccaccacacccggcaatttttgtattttttgtagagacgggggtcttgctatgttgtccaggctggtcttaaactcctgacctcgagcagtcctcccaccttggcctcccaaagtgctgggattatagacatgagccacggagcctggctctgtctccctctttaatgagtaatttttacaaattgccaacctcaccactagttagtacacagtgactgtagttgtcagaggctcaaacgtgtatctggccatccgtgtttctcctgctttctggggagcacttccctacgcactcataaactaaccctacaggggttcatgccgcagccctgtgaggctggcagggcaggctgaaagcgaatgctctcattcctgctaagtgatggtggacctttgctgtcattagtaaacaggcctggcatttgctggggccctggaggacctgctctcgtgaaactcatcatttcctggctggcgggaggggctcacccgtgctgcacgtccagaagctgaggccagttgcctcgcctgagggtgggaggtaaaaggtacaagtctgggcttgaactcagatccttcaattctgaatctgctgcgtctgccactagggcagcgtttccactctctgcactgtggacatcggcgtgggtcactctctggggaggggccatcctgggcactgcagggtgctgagcagcgtccctggcctccacccactccatgccaggagcacccccagtcatgagaaaaacacaaatgtcccagacttggcccagtgtcccctgggggcagaattaccctcaattgacacctcttgggttaggggattccacggacccccaagagactccgtggcccatgatcctctgctctgctgaggtcccaggaggctacacacattgaaatccacagagggggagaggaagagaatcccaggagctgaggtcccctggtttacaccgtctgccatattgggagtttattctggtgtctggtgtgagcagggagcagacttgatttttttttcccaaataactaatgcagtcccccacttggcattcagggctggatccttctctgggtgagtttgtcctgggcactgcaggtgctgagcaatgtccctggcctccacccactccatgccaggggcagcccctcctctagttgtgacaaacacaaatgcaccccccgcactgccccgtatttccaagtcccctgggggcaaaactgccctggggcaagacctcagctagattggcagcttcccctctgatctaatctaccagggactccactgaggggattctgggggccccgatacccgatccatcttagcccagccaagtccgcatccccagagctccgcagctgccaggcgcttctgaaaccagcatctgcagcccggcagagctggcatggtgactcaggctgccttggttctccagggcacgtagggtgcgactccccacccaggtgtcccagctcagcccatccctttgtccccggtgggaattgtctgtgcttggagtggctcacacccccgaccacttcctttttcttctcatttgcctcgtggcccagaggatgttggcgggctgagtcagggatagaccaccctgccccctgcccccacaggcctgaacacggtgaagattctgcccctcaacaccggacgatgtctggggacatctgtggttgtcaggttttgggggaactcctggcatggagtgggtggaggccaggaacgctactcagcaccctgcagtgcccaggacactccaccccagagaatgactcaatacccagggggagaccctggccccagccccacacaggaagtaacaacttcctccttccctgtgggacttatggtcaatgaaatacgacattaaacatagcaatgatacaaatacgttatttttttttttaagacggagtctcgctctgttgcccaggctggagtgcagtggcgcgatctcgtctcactgcaacctccgcctactgggttcacgccattctcctgcctcagcctcccgagtagctgggattacagctgcctgcaaccgtg[133 bp omitted]cccggccaaaatacgtgcattattttaacacacttttaaaactaataagctgaatataaagctctgcattaaagccagaagacctaagagaaaacccacaacctgtggggaagaaaagggagggaaacctccgtgaaactgacccctgcagtaagtaaccctacaaccaagattccagtgccggctgctggccagatcaggggaacacgcgcttcctgcagagtcattcccaagcccatctggctggaaagaaaagccttaaacttgagccaaaacctctcaacccagaggagacttctcatccttgtgtaacccaggacggcccggccacacagttttaagaagaatgagacacaggctctgacacggaaggacacccaatatccgataagtgcaaaaaataagttgcaaaacagtatggatacccagacctttttttcttttttggagaccgagtcttgctctgtcacccaggctggagtgcagtggcgcaatctcggctcactgcaagctctgcctcccgggctcaagcaattctcctgcctcagcctcccaagtagctgggattacaggcgcccgccactacgcccagctaatttttgtatttttggtagagacggggttcca[138 bp omitted]ggggtgcggtggctcatgcctgtaatcccagcactttgggaggccaaggcaggtggatcacaaggtcaggagtttgagactggcctggccgagatggtgaaaccctgtctctactaaaaatacaaaaattagccaggcgtggtggcgggcgcctgtaatcccagctattcaggaggctgagacaggagaatcgcttgaacctgggaggcggaggttgcagtgagccgagattgtgccactgcactccagcctgggcgacgagcaaaactctgtctgtaacagaaaaaaaaaagagaaagaaagaataataaattgctacaaccatgaaaaaaaataaggaactattgtgtctggaaggaaaggttttttttttttttttttttagctgcctgtttgtttgagatgaggtttcgctctatcccccaggctggagtgcagtggtgcaatcacggctcactgcagcctcaacctcctgggctcaaatgaccctcccacctcagcctctcaagtagctgggaccacaggtgcacgccaccacgcccagctaacttttgtatttttggtagagatggggtcttactatgttgcccaggctggtctcaaactcctgggttcaagctatccttctgccttggcctcccagagtgctgggatcacaggcatgagccatagcgcccgaccctctgtgaatctttgtggtaaactgacatacttttcccagtctgggtatataaggaaaaaaacagtcattttgatatactcaaaaggaaaagggggtgaggcgcggtggcttacgcctgtaatcccagcactttgggaggctgaggcaggcagactgcctgagctgggcaacatggtgaaatccagtctctactaaaacaccaaaaaattagccgggcgtggtggcgcatgcctgtaatcccagctactcaggaggctgaggcacgagaatctcttgagctcaggaggcggaggctgcagtgggccctggttgcgccactgcactccagcctgggcaagagaaactccatctcaaaaaaaaaaaaaaaaaaaaaaaggaaaagggaagaggccaggcatggtccccagaaggtattgtgtcaaagtctgaaagaaaacccaagttcagctttcttttgtgtgcagccaggcacacgctggaccacagccacccactgtgtgttccagagacttctctgggactccgaaaggcagaagtgaaggcctcctcccagaatcccgtttctgaagtcggatttaccttttcggcttaagccatttgaccttctaaatgccaggaaaacaggaacagagctcatcggctggggaaggtctaaaactccccaccttaaaaccccaagctcagtcagctgtgtggggaatttttctgaaacctccaccatcaggtccctaaggtgggaggatacctccttggaagggaatttttttttttttcgagacgttgtcttactctgttgcccaggctggagtgcagtggcgtgatcttggctcactgcaagctccgcctcccgggttcaagtgattctcctgcctcagcctcctgagtagctgggactacaggcacgcgccagcatgcccgggtaaattttgtattcctcagccgatgagctctgttcctgtcttcctggcatttagaaggtcaaatggcttaagctgaaaaggcaaatccgacttcagaaacgggattctgggaggaggccttcacttctgcctttcggaatcccagagaagtctctggaacacacagtgggtggctgtggtccagcgtgtgcctggctgtgtatttagtagagatggggttttg[131 bp omitted]tgcaaggcctccacagccacaggtagtaagctcagctccagagttaaaagagaaaaatcaacctgtggaaagagagggagctgggaagggtgcagtggaacgggtgttgcttgaggtgggtgcctgtgtcgtccctggggaaagggaaacacatccagggggtccggaggacagggacgtgacatgctgggatttcactttcttagttctcactctgtaatcggtagatctcagtgagttctaataaacaggtccctgacaactgcggttaagaacccggcttctggaagttctcagggctgcaactctgcaactc[136 bp omitted]gcttcgcctccagggttcatgccattctcttgcctcagcctcccgagtagctgggactacgggcacccgccgccacgcccggc[138 bp omitted]cctcttgcacttctgaaacaaccagcaaaccaaccaaccgaacaaataaacatccagcttcccctacatgaaagcaagaccaggcctggaaaggaagtgaatccaggagaacagaaacggaaggtgggttttgtctcacgggtcaaaacctagatcatcccacacacgcagggaaatgaatgactagttcctcaaggcatcactgtgggctctgacggctccagccttcagcagctcctcagctctgcgtcccagcgcctcttccgtaaaagggaagcccctgtgactgcgtgatgcacaagaaggaaggcggtcttgggaccacggcctagagggcggccagggcactccccgctgcctatgcaggaggcaactcccaaagcagaaagcacagatgggatgtgaaacacgcaaaacacaatgtcaacatttatccaaccatctgctttgaatacgggcagtttattgcatgtcaattaaacccgtataaactgttaa[148 bp omitted]actccgtctctactaaaagtacaaaaattaactgggtgtggtggttggcgcctgtaatcccagctactcaggaggctgaggcaggaggatcacttgcacccgggaggcagagtttgcagtgagcagagatcgcgccactgctctccagcctgggcgtgagtgagactccaaactccgtctcaaaaacaaacaaacaaacaaacaaacaaacaaaaaaacagtgtgtacaaagactggaaatcttacccccaggatgagctgcggcttggagcactgattttctgctctgtgactgcattttccaatttcccctcccctctcagtgactcctaataaaatgcaccctcgcttacactttctagcccctcttcgctgcagggaggaggggcagcttgtccctggcgggcgcctccttccggggtgggggggccctgccagcgactttggggaccccgagcaagaagggcctattcgaaagggcccgaccgccgcgttggcttggggatcctgaagccctgcagaattttaatccacaccgggaggtgcggggtcctgcgggagggcagcgggcagggccaggagttcacccccgcagctcgaccccgcaccctgtatccccctccggggtaatcggtctccccgccgcccgcgttcgcccctcctgggggatcggcctcctcgccgcctaagttcacccctcctgaaggatccggcttccctgccgcctgagttcgcccttccttttttcttttttcttttgttcttttttttttttcccccgctctggttgcccaggctggagtgcagtgatgtgatctcggctcactgcaacctctgcctcctgggttcaagtgattctcctgcctcagcctcctcagcagctgggattacaggtgcgcgccacctcgtccggctaattttgtatttttggtacagacggggtttcacc[142 bp omitted]cccgtctgagggatccagcttccccgccgccagggttcgcccttcctgagaactcggtctcctcgccgcctaagttcacccctcccgggcacccacctggccgcctctgccgcccgccttcgcccctcccggacacccacctgatcgcctctgccgcccgccttcgcccctcccggtacccaactggccgcctcggccgcctcagccgccgcaccgcctcgcagccgccgcggagggacacggccgcgggaacgccccacacgcatgcccgaccgcacccgcggaccggacctactttccttaaagggcccggggctccgcgcagaagcggcgtgcaggggtctcccagactcggtcccgcgggctttaaggggcccgggcggcgaaggcgcacggagccaagttccgggcagcagccctgggatgccctgagccgggccgggcggaggtctccgttgcctagcaaccggggccgcggcctgtgggcggagcctgcaccgtggctgcgacacggggcggggcctcagcgggagccggccgaggagcgggcaccggccattggcacaggcacgggccattggcgcatgcgtagggcgcggccttggggcggggcccacccagtggcggagtcttctgaggggcgggtcgtgggcggggcctggaggcggagccggcgccgtcagtagtcggctgaggacggaggcggggctgggcctgggatggggcggggcctgcgctggtggggcgggcgggggaggagacacggccaagcgcccgagtgggggccgttggttggtgcgcggctgaagggtgtggcgcgagcagcgtcgttggttggccggcggcgggccgggacgggcatggccctgctgctgtgcctggtgtgcctgacggcggcgctggcccacggctgtctgcactgccacagcaacttctccaagaagttctccttctaccgccaccatgtgaacttcaagtcctggtgggtgggcgacatccccgtgtcaggggcgctgctcaccgactggagcgacgacacgatgaaggagctgcacctggccatccccgccaagatcagtgagtgccggagcccagcccagtcccgactaccccgccagcgagaccccggggcaggccggtcacctggcttctcctcctgcccgcagcccgggagaagctggaccaagtggcgacagcagtgtaccagatgatggatcagctgtaccaggggaagatgtacttccccggtaaggggcgcgaaaccgaggcggggcccccccaccccgggacaccccgcccaccgcctgagcctgaccttctcctgcctcgacgactcagggtatttccccaacgagctgcgaaacatcttccgggagcaggtgcacctcatccagaacgccatcatcgaaagtgagcaaataaggcttcagaggagggaggtgttgcccagagcctcggagacccacggggcttggctgaggctggagtgatgtgaacagggcacctggcaccaggcagctggggaggagggcagctctccagggagggacccagcctagcacctgaaggatcaatgccatcaccccgcggggacctcccctaagtagcccccagaggcgctgggagtgttgccaccgccctcccctgaagtttgctccatctcacgctgggggtcaacctggggaccccttccctccgggccatggacacacatacatgaaaaccaggtgagcctgggccccagtgccgagggacaggccctgaggctttggagggttgggaggaggcaggactggggacaaggctgggcctggtaagatggcgctgtcctgccctcccacaggccgcatcgactgtcagcaccgctgtggtaagcaaggctccgtccaggctgaggggcgtgccggtggcagctcggggccctggaggctgaggggagccctggcggctcttgtacgtgtttcaggcatcttccagtacgagaccatctcctgcaacaactgcacagactcgcacgtcgcctgctttggctataactgcgagtagggctcaggcatcacacccacccgtgccagggccctactgtccctggggtcccaggctctccttggagggggctccccgccttccacctggctgtcatcgggtagggcggggccgtgggttcaggggcgcaccacttccaagcctgtgtcccacaggtcctcggcgcagtggaagtcagctgtccagggcctcctgaactacatgtgagtggggtctttgggtggcagcaagctcacctgggcctgggagggaacactggccacggccactcggcctcctgagtccaaacccactgtctttgtagaaataactggcacaagtaagtcccctcctcaaaccaacacaggcagtgtgtgtatgtgagcacctcgtgggtgagtatgtgtggggcacaggctggctccctcagctcccacgtcctagaggggctcccgaggaggtggaacctcaacccagctctgcgcaggaggcggctgcagtccttttctccctcaaaggtctccgaccctcagctggaggcgggcatctttcctaaagggtccccatagggtctggttccaccccatcccaggtctgtggtcagagcctgggagggttccctacgatggttaggggtgccccatggaggggctgactgccccacattgcctttcagacaggacacgagcatgaggtaaggccgccctgacctggacttcagggggagggggtaaagggagagaggaggggggctagggggtcctctagatcagtgggggcactgcaggtggggctctccctatacctgggacacctgctggatgtcacctctgcaaccacacccatgtggtggtttcatgaacagaccacgctcctctgccttctcctggcctgggacacacagagccaccccggccttgtgagtgacccagagaagggaggcctcgggagaaggggtgctcgtaagccaacaccagcgtgccgcggcctgcacaccctgctgacatcccaggcacgagggtgtcgtggatgtggccacacataggaccacacgtcccagctgggaggagaggcctggggcccccagggagggaggcagggggtgggggacatggagagctgaggcagcctcgtctccccgcagcctggtatcgccagccttaaggtgtctggagcccccacacttggccaacctgaccttggaagatgctgctgagtgtctcaagcagcactgacagcagctgggcctgccccagggcaacgtgggggcggagactcagctggacagcccctgcctgtcactctggagctgggctgctgctgcctcaggaccccctctccgaccccggacagagctgagctggccagggccaggagggcgggagggagggaatgggggtgggctgtgcgcagcatcagcgcctgggcaggtccgcagagctgcgggatgtgattaaagtccctgatgtttctctttgcagaagagttcttgttggggcagggggaagcctctaggggctggaggtgggcttctggggaggcctaaaggtcccagacagagcagggcaggtcctggccttgggtccacagccatgagggaccgacttggagccacactcacagggcctcagggagtgtccccggactcctaggtgtggggccgtggcccacctgagcacacatgggtaggctcacacaagcccacagagcacctgggttcttccacccaaagcgaggccacagtgtggttgagaccagggccagcactagtgcgtttaggtgttgcagtcacttacgtcagacccgagccaaggaacgcaggaactatgggctgtctcatctgtggcagtgacaggcgtggcatcatggccagagtcggggccacgacggcctgactctggctgatggggcctgacacacaggagggagggagtcgtgttccatctgtgcaggggcgcagctccaagtcccattctcactcgggcgacctcagcccggcagtctccttgcttcctcgagcgtccctttgctccggcattggggcggctgcaggacaccagcaagaacatcctcgagcacactgttgctgccaccatgggtcccacacactgtcttgtggccgcctcaggctcccgtcacgggaggggtgcacgggcacatttgctgaggtcaggaacggcgtgtgggaaggtcaccgagtgcctcccaggctccctgggacatgggagccacacgcatgttgggggagaatgtggtagtggccactggggacagtgtcaggagtgatggcgctgggtcctggctgtgaaggatgctgctttcgaggccggcaagcgtgtttaggtaacggcaaagaggctcgcggcaggtgctttcaaggcatggttttctagaaaggatgctggtgtgggccggggctggggtcccgtctgtgctgctctgagccccctgacatccaacgcccgccaccacggccgcgtcttgggttagagtggacaggggcttcccttcactgacccagcgtcaccttgctcgaggctcccgtcttcaaggtgtaaggctggtgtaaaggaggcaaattcacccaggggtggggtggctgctcttccgcggttctcaattctggatctgcccctgccccgggggctcctggggaaggggagggaaagcaggcacctgctcccctgcacggccttgggtggagatgctggggaccgaggccaccacggggtgggggactccctggcctgtgactgcccgagccccaggcctggatggtgctggggaccgaggccccctcccaagggcccgtgagctgaggtgcagaggctccagtcctgcagcgctgcatgacccaggccaggcagaagacccatgtggaaatgcctgttttacaactttattggatcatcttgacacaaaatcatgacagcagcgtgatatgtctctctctttatacgggaatgtcgatagcaaataaattcttatgtaacacatcatacaatttcaaatcctggaatcactgcatgggattctgtaatggattacatgctaaagtgacagttttcatcaaaaggagaagataaaatgtcattatctctgaagaagggtcagtcctgtgcccacgctggccgtggggagtgagcggagtctccttgccctgcctggtgggggctctgcctgtgaggtggctctcacaggtcctgcccaagggcactgggcacactccttcaacacagaacagcccaggtccgctgcttccaggccctgcctgggccttcctaagggtgctgggaaggatgtggggaaaccttggtgcgcatagtggcaagcaggggatgcggaccaccccaaacccaagccgagatgcacttctgctgaccaggaagacgggtggcagagaggcctcaacccaccccgtccacggttctgactgcaacctctctttggcgtccctggccccgccctgcccacagcctggctggcgcgtggcctgggatcccaagacccagtcaccagcccacgagcacactgacaatggacaacgcctggcaagaccgctttcccactgtgggttctgggagagaaaaccttggcgacagcggcccttccttcccctcccccggacgcaaccgtcaggacctttgggtcaaaagcaggcgaccccagaggaggccacgtcagccccgccctgtccaccaagtgcccctcacgtggtgcccatcaggccctggcccaggacaggagcccctgaagccacattcaaggactcggcccccagcgcggggcagggcacagacccaggtgggggagtcccttgctggtttgggggcgagaaggggacttcttgccaaagagaatgggaagagtcacagtaaaaaaggatggtcagataattcaacgcaacaaatgacctcggatgtctacacggcggacaacatagagttaaattaacactcaggcttgggtacagtacacacgactgaggagaggcgagacacgtcagggctgcggtccctgggtacgtgctccgcggggtggtgcggggctcgcaggcagctctcaacacttggccagcgtcgccttcatctcttctaacaagttgctcagtagcgtggagtcactgcacttcccgtcgactgagacagagttctcaccctgtgtaaggaaaaaagatggatattttaaaagtgtgtgcaggggctaggcacggtggctcaagtctgtgatcccagcattttgggaggccaaggtgggtggatcacctgaggtcaggagttcaaaaccagcc[135 bp omitted]gctaacagggtgaaaccccgtctctactaaaaatataaaaaattagccaggcagggtggcgggtgcctgtagtcccagctacatgggaggc[133 bp omitted]aaataaataaataaataaataaaataaaaataaaaaatgtgccgggcatcgtggcaggacacctgtaatcccagctacttgggaggctgaagcaggagactctcttgaacccagggggtggaggttgcatgtgagttgagatcattccaccacactccagcctgggcaacaagagcaaaactccatctcaaaaataaataaataaaagtacatgcaggccaggccggatggctcatgcctgtggtcccagctatgcgggaggctgaggcgggagggtcgcttgagcccaggagggtgaagttgcagtgagccgtgtttgcaccactgcacaccagcctgggcgataagagtgagttcctacctcaaaaaaattaaaaaacaaacaaaaaaacactatgtgcaaatattgcctcgcagctgtatgtgttgtccttttaattttgcgaatttgctaattattaaaaaaaaaaatgggaagggctcgggtgagggagcggcccaaggcacctgggtctcccgtgggaggggctccagcctacatagaagtgggagccggcacctgagggccctgaggcagccagaggcagccggggatgaagaccagaatccgaagagctcctgagctagcagacagttgagcactgtctgtccttccgccctcctgccactgggcccctgaagtgactgtggaagaagccagtggagtggggtaaccagagcccccagagagggaggtacgcggggaaagccaccccgtgaagctgctcacgatctgctaggctcactccatgctgcggatcccgttccaaagagcaaccgaaggcactgagtccagaggccgctgccgggtcccaaggccagggacaagaggcagcactgacaggagaggctgggcaggtggtggtgtgcttggggccacagtccccagaaggcaggggggacttgcagctgggacctgaccacccacgtcctccacaggatggaacaaggcccagaggctcacagcactccacggaaaacgaccaggagaatccactcatacagagaggccctcggcagaccccagtgccaagaccccagtgccaaggcaccaacaccaagacaccagtgctaaggcactaatggcaaggccgtcggtagaccccaatgccaagatcacatcacccagatgccaacaccaaggcaccaatgccaaggccatcagcagaccaaacaccaagacactaacacccagaccctaatgctgaagcaccaatgccaagaccccacgctcaagaccccaacaccaaggccgtgagcagacaccaacaccaagacaccaacacccagaccccaacgccgaggcaccaactccaagacgccaacactcagaccccaacgccaagacaccaacactcagactccaacaccgagacaccaacgctgagaccgcaacaccgagacaccaacactgagactccaacaccgagatgccgaaacccagaccccaacaccgaggcaccaactccaagacgccaacacccagaccccaacgccaagacaccaacacgcagaccccaacacccagaccccaatgccgagaccgcaacactgagacgccaacacccagaccccaacgccaaggcaccaactccaagacgccaacacccagaccccaatgccgaggcaccaactccaagatgccaacacccagaccccaacgccaagacaccaatgcccagaccccaacaccaagacaccaatgcccagaccccaatgccaagacaccaacacccagaccccaacgccaagacaccaatgccaaggccattggcagaaaccaacacgaagaccccaacgtgcagaccccaacaccaaggccatcagcgtaccaaggtggacggacactaggactctctgacacaagtttttttttttttttttttttttggagtctcactctgttgcccaggctagagtacagtggcacaatcagggctcaccgtagccttaaactcctgggctcaagagatcctcccaccccagcctcccaagtagcagggactacaggctcactgtactaatttcttagtactggctaatttttttaattttttgtagacctggggtcttgccatgttcccaggctgatcttgacctccagggctcaagcgatcctcctgcctcagcctcccaagtagctgggaccacagtcacacaccaccatgcccagctggcctaagctttaaagtagctgttaggaaaatgctccaacagatcaccagggcatcagcaaagacatggaagatacaagaagggcccagtgggaatttcagacctgaaaaataagaccctccctgtgtgggctcaatggcagaacagctaggacgaggcagactggtgagcttggcaagagagcaacagccatgaacccatctgaatacggcctctggggcgtgaggggcagcagcccaggctggggaggtgttgggagcaggccccccaaaatctggccataaactgaccccaaaactggccataaacaaaatctctgcagcactgtgacatgttcataatggccctaacgcccacgctggaaggttgtgggttgatgggaatgagggcaaggaacacctggctggcccagggtggaaaaccacttaaaggcattcttaagccacaaacaatagcatgagcgagctgtgtcttcagggcgtgttcctgctgcagttaactagcccaacctattcctttaattcggcccatccattcgtttcccgtaggggatacttttagttaatttaatatctatagaaacaatgctaatgactggcttgctgttaataaatgtgggtaaatctctgttcggggctctcagctctgaagactgtgagatccctgatttcccacttcacacctctgtatttctgtgtgagtgtctttaattcctctagcgccactgggttagggtctccctgaccaagctggtctcggcagggaggaagtgtgcagcacccaaaaagcagcaacagatcagctccagccgcctcaggcccagcagaatggctgccgtcagccgggcgcgggggctcgtgcttctaataccagcactttgggagtctgaggcaggcggatcaggagtttgagaccagcctgaccaacatggtgaaaccctggaaaccccgtctctactaaagagacaaaaagattatccaggcgtggtcgtgggcacctgtaatcccaactactcaggaggctgag[136 bp omitted]gaaacagggcctcctgcacggcagcaggcgggaaacaaagtgcagcactggggaagacagtctggcagctcctcaaaacctcaaacgtggcattaccacaggacccagcaatcacactcccgggtgtatattcagaacaaatgggctcactcctgcaatcccagcactttgggaggccgaggcaggcagatcacccggggtcaggagttccacatcagtctggccaacctggcaaaaccccatctctactaaaaatacaaaaattagtggggcgaggtggcatgtgcctgtaatcccagctactcaggaggctgaggcagaagaactgcttgaacctgggaggcggaggttgtggtgagcccttggctccactgtactctagcctgggtaacagaacaagactctgtttccaaaacaaaaaaataaaaaaaaacaaaagtactgaaggcagggactccaacagttatttgtttaacaacaatgttgatagcagcacaattcacaacagccagaaggtgggagcagcgatggatgagtggacacacagcatggtccatctgtacaacaaaatatgattctgctgtgaaaaggaagggaatcctgacagaggctgcgatgtggatgcaccttaaggacatgaggtgtaataacagcagccagacacagaaggatacattccgtgtggttccactcctaggaggtccctagagccatcagattcacaaagacacaaagtagaatacatggtgccaggggctggggaggcaacggggagtgagtgtttcatgggaggcagtgaatcaggagaaaactgaa[132 bp omitted]aaccctgtctctactaaaaatacaaaaaattagccggatgtggtggcgggcgcttgtattcccagctactgcggaggctgaggcagaatggcatgagcccgggaggcggagcttgcagtgagccgagaccgcgccactgcagtccagcctgggcgacagagtgagactccatctcaaaaaaaaaaaaacaaagcaagggtatcaaaaccacaacagacctctaggaacggaatgctgagtagtgaacatgagccagaagaaggcagagaagcgaaagaaacacgtgcaaactggaaatcctcagtatgctcccagagggcactggaaccaaaccggacatcaagaaaaattggttgtttgaaaagtgcaataaaggccgggcgcggtggctcaagcctgtaatcctagcactttgggaggccgaggcgggcagatcatgaggtcaggagattgagaccatcctggctaacacggtgaaaccctgtctctactaaaaatacaaaaaattagccgggcgtggtggcaggtgcttgtagtcccagctacttgggaggctgaggcag[136 bp omitted]gagaaccaggaaaaaagagacacaaaccgtgaccatcagaacggaaagtgacccggtatcatcacaaggagcagcgcgaatacggcacgcaccgccacgcgtcaactcagtgactgatgattccttgcgctaattctttgaaaagtacaaaactaccaaactcacccaacgtgaacggtaacttggggattcctacaactgttaaaacaaaaaactgaggatgtagctaaaagcctgcagaaaaggaactccccaggcccgatggttttctggtgaattctgtatacacatttctttctaaggaagaaatgccacttatcacacagtctgccccaaaacagagaggacacactctactgcacgtctgatgaagccactggatgacaaaaccaaagaagccaccagaaaagaaaactaaagacccaactcctcatatacagacacaaaagccctcaacaaaatattcacacactgcgtttggcagtcgacacactgcgaagacaaccaccctgcagtactcaggagagggaggcccggagcggagggagcgaggagtcattctagaagcgcagcagtgagaggtggagagtccgaccccagggccttggctgccttgtgcacaggggtggggtggtgggcaggagtgcagtgggagtggggcccctggagccatgtgtcagcctgcggtgagcagcgcagcaggaggcagaagccctgtcttgctgagggagagtctgtgctgctgagtggggctggcacaggtgaggggctcatggcagcagtgctgccatcactgtcctcgagccctctaagtcccaaagcgcgcctctggggatgaaggcctgggcatgaccccaggagaggtggcaggagccagggtgtgcacagcagcccgaggctcacctttttcaccaggaggcagacatggtggccctggatggagcggctgtacatggaggcgcaggagtccactcgctccacaactgcaacagagcgggcagtgttaggcttcccggacattgcatggctgcagccccacccccagagcaggggccaccttcttgggctgcccttggccacagcttcaggaggcctgtaggagcagggtgtggccctgagaggcctggggtgtggggaatgcagcccccgcaccagctcccaggcctcggggccaccagccacccgggatcccaaagggtgtgagtttgggtgggagggccacaggcccggctccaataggaagggacagctgccgcgtgcgtgaaagccccgtgcaatccatcagcccctcactctccttaccggaaaaatggtggtgaaaacagatcttcgccagaagattctggaaggacatccgaatgccatcgactttgattgagctcatgctcaagtccccagactccagcaacttagcaaaggcgtcactgtgggagggacagggaggctgactgcggtggggccgggctcctcaggcttcctggcacagaggccaacaaaacctgccacacacgctgcgcttggacaccctcctgtgtgtctgggccgggaggtcttgggggtcctggaaggtgtggctcattttcatgtgcggaagccgtcacacccagaaactgacaatgacttgtctttaaagaggtcacagaggtgcctgaagccatgggatgggccctcctccgacaaggacggatgtcctgtaggaagggactggggggataggctaggatgcaggcacgcagaggacggcctgtgaggactcaggggggagggggtgccgcacgccaagccgtgccgaggagaggcttcaggaggagcctgccctgctggctccttggtctcacccctccagccttcaggacttccaggggcctggacctctatgggtgacgctgcctggcctgtggcttcaactacacggccccggctggcgcagacaccaggcagcctgacctgcaccagtcacgagccagcgcctccaaatccgtctctaaagtcctgcccagaagcctcagtccccggggcacaggtgtctgcaaggtagaggggaggcggagggggttcggggacataggggagtgggcctgggccccacctgtagcagggagtggtgatcaagtaggagctgcagctgaagtgcagcctgaagtccagcttctcgtgggtcgcaccctcgtcattctgcggtggagtgaaggtggtgcagttgagaggggagtcgggcccagctcagggctcagggttccccaggcaggtggcccacttcccctagggacacctggacacccactgcgatggggcaggaggagcccctgcctgcagagtcggctcttcaacgccaagtggagccctgcataccttggcaatgaaggacagggtccccttgagcttctgcgccatgacgatgctctggatggtgaacacatactgggcttcgttggagacgcctggcgggggcgagagggagtggggcctgagacgctgcgggggctcagcatgggtggggcctccaggtctgtcctcagtcccaagtcctctgtggctgattaggaaactgagctcagcccccaagggagcaccaggggacaggagcagaaacaagaggctactggtgtccctaatttggcctggacttggtcccatccctgtttcagagggcagacttggccactggaaccgtggaacccaagaaggccccagaatccagcccccagcacaacccttgggactctagccaggtccatccgaggccattgcgcttctcagagagctgtggcgagaccccgacactcaggaggtactgaggtgcagcctggggacaaaggggacatggggaggaagcaacaagaaccagcggatccgggcagtcaccagctgccactgcgctcccacagtccccaggagaggccgtgagtggggcagggctcacctgggggcagctggaaaggcacggggacgccatcgtggacggaggagccctgcggccgggccatcctggcattgagtgagtccagcacgctgagctccatgcccttgaggatgctgctgctcctgttctccagcacgatggccacagtgacctggctgtcctcctgcagactgccccggatgtcacaggtctgcagggcatggccagtgttagcagggcaggcgggcccgccacagggaacaggcacagccacctgtctcttaatgaccacagaggcagcaggggtcccacaggcacaggaaggcacggagaggggcgccccctagccgcaggccaagcgcctcctatggctgctctttgagtgcatggcggggaccctcctgccagtccaagtctcagggcatgtctccaaccttaccccaagccagaggtgctgcccaagcaacgcccctgccaggaatcacaggccctgggtataccaacatccgggagctgtgggggctgcccgggttccgcgcgatcccatgccaaagagtgtgggctggcccaccctgcccctgggagcggctgccactcaccattttaacataggaattttcagcgaggagggagtagctggactcaggctggaaatagaaaaggcgcatcagccttgggggccccgagctccgtctcagcgaagactccagtatggcccaataccccaggtcgaatgccacgactccaagaatgcttggggcaaggggcttcaaaggagccgatgagggatccccggctcccaggaccacacagcccaccacgggggtgcctaatgtggggctgcgggccagggccagtcccctgcccccgccaggctcggcttcttctcgaatctgctcagttctctcccgcatggaggctgcaggagtggggagcagcgcacagcccgccaggaaccccggcgtggggcgggggcgctgaagtacccctcaccgggagctgctcctcctctggcgcgccattctgcaccggctcccccgctgcctcctcgctgcctggaggctgcttcttggacttcttcttgcctttggtccgctcctccttctccttcctgtgcttcttcttcttaggcttgggagatttctggagcaagaggagggtcgggttcagtgcccaggctgctccagcacgcccccatcacagtgtgaggtcaggatcacagcagggctgctcaggctgagggtcccacgtgcctgggtgggatggcaggaccagccacgcctcaggcctaccgggacaagctcaggccagaccaggcccagcggaggctggggccgtctctggttggcggcaagcgccaaagcagcccggggaacagtccccaccgaccagggagccatgcagggcaaaccagtgaggacaccacacttgacgcagcaaccccacgcccatgtgcacatccgagagggaacacacacatccacgcgcactgcgcagatgttcaaagcggcatactgtgtcaccacaaaggggaagcggcccaagtggctatcaacagatgagtgggtcagcacagtgtggcccatccgcggaggaacggggtcagcagagggtgacctgtccacgcactggaacatgacccggccacgaacaggaaccaggctctgacccaagccatagtgtggatgcaccttgaggacatcacactcagtgagacgccacacacaaaagaccacacggtgtatgaccccatttctatgaaatgtccaggacacactgatccacagagacaggaaggggatgcgtgggtgccagggcagggaagggagtgagaagtaacggctggtgggaatggagcttctttaggggtcatggaaagttctggaactagacagaggtgatgatggttgcacaactctgtgaatatacagaaaaccactgtatacatacttcaaatgaataaactctatgagacttatgaaccatgtgtgaataagaaggttattaaaaaaacacaagaccacaaccacaacaaaaggcccgtgagaacgccaacacaaatgcgagagcagggctgccctgggacctgggtggcggaagctgtgtccggccccacgttggggtgctggggctcatgcagccctccacagcccctgggggagtgacagcctcaccttgtcctggtcttgcccctcggcatcgtcctcctcgccctgcgcctccgtcttggcgtcctcacactcgtccttcggggtagtgacagtgttcacactgagctccccctgcagggagccagggcttggggctcatgctgggcaatgaggggccccactccactgcaccccagacagcctccatgccacacaccctcagcttgccctcacgcctgcctgagaggccacagtgccctccgagtgacagggagcctgtgagcacagaggccctggctgtcctccccttcccctggcccctgcttggcccactgggacccgggagcatgaccccggctccactcagtgctgggtcccacaggtgcacggtgctgaccgcgagagcacagggcctcaggagacccagggctcttccctgagtgccaggtatgacctctgcagacaccgaggctggcactggccagctgccagtctcttaccgtggatggaacgggggcgggggcgggggcgggggcaggcggtggggtggtagacagccagaagtccaggtcctcagcctgaaaccacaagacaggctgtcagcaaacgcagtgcaatggtcctgggaagaggggacggggacagcagggccaaggaggccccagctgccctcgctgcccccagggtcctggactagctgggccttgcagagcctgggaatccaggagctgaaggcgatgtcctcagccagccctgctggctctggctttcgctgccagaagagggccggggacaaagctgtgggtgggtgtgtgccattccagtggtcagaaggcccgtggcggcccatatgtcttatgtctgcctgggccacctgacgtgggtgtggacaggctcccaggccctgcaaacacatgctcctttgaaaaacccatttctttctctatgtgaaaatctgcacacagacactgcagaaacggttctggagctgcacgtgagggtggcatctggaccacgccgagctctgaccatgtccccccaacacaggtgaggacacggctcacccatgggatcgttgggtcctcctcagtctcccctgacacaagtgcacagtcagctcccctcagaagccacatgtcctcactccgccggggcacagggcgaggcggctggcactcgctgcctgactcagactcacagccatttcccctgagctcaccgctgtctcctgggagttcacggcaagggaggggaatggagaaggccgccgccctgggcactagccttaccttcttctccttctccttcttcttctccttgtctctctctttctctttgtgttttttctctttcttcttgggtttcttgctcttcttttctaccatgggaacgtccttctcaggggattttgaggtctcggtgtttctgtgtttctgaataggcagtttctcgctgtcggctaagggcctggaggaggaatgaccgggccacacatcagcaccactggccaccccccaggaccactcagtacatgccgtgtccaagcatgtggcagtgcgggacctgctcctccagcccctggccccagccatggcccaacatagatctactcaacacagcctgctggaggctctcatgggagggtctgtggtggccacaccctgccctgtcaaggcatggagacctcccgagcaccccaggcctggagacttcagagtccacacttaagagtcttggttgggagggccagccaagagcagtgcagtgaggacgtggtctggggaaggcccgcccgcaccccaccccagcctgcccaccctgcagagcccggccccacccggaagggaggacgagaggaagggaagcaaccacatgtggcctccaccctcaccctgaacccatatggactcacttatccaggtcaatatccagagccctgtaggggtcgttggggtctttgtcatcctcgtcgctgggcagagcattctgacaggaagagaggaaccccatcactggaacccgcccttgtggcctggtggaacgccatctatctgggacgcagtgggactgcccatgcgggccacacgcacaggtgggcagtgacgtggctccaccagaggctccgctcagcgtctaggcactaagggcggctgggccccaggacgcagccaacctgcatctgcctctgaagctgctggccctggggcggtgcgtcgggacgcgtgctcgaggacagagaggcctctcctcctatgctctccggggtggggcctcatcccagccaccaacgaagaccatggggagaggccactgtgcatggccccaggacacacacatgcggaaagatagacatcctaggaccgggacctccagcgaggctgacctcaggcatctcctctgtgacgatgtccacctgctgggcaggggcgatgtcctcgtcgctctccgtgggcagcgagctgtggcggcgcttgcccttcttctccttctccttcctctttttcctcctcttgtccttctccagcttctgccggtgccgccgctcctcctccagcttcacatactgatctgacataggcagccctgcgggccggcagcgggcagccactcagcactgcaccccaggggctcacggggagggcggcgggagcaccccacagcccatgtgacaaatgcggcgccgacacaccggagacacttgcctggaaccttcaaggggacggagaggtcaatctgcaccacgggaatgtgctccacgcccggggtgtcctggtaccgctgcaaaggcaacacccaggcgttaccggtgcaccgaggggtgacacacgtgcaagacaagcctcggggatgcagggagcgtgacgcagccccaacatcctaaggagctggggtcctgccagagccctgggccgcgaggagcgccgtgagcgagcgcatcccgaggacccgactctttaagacagtgaggactggaaagcttgtcacacgagtgaccccacaggcctatgagcagagagaagcaaatcctcgttcactttttttacgtgaatattctgttttctcctcaaatgagaaaagtaatgcggcctcaagcccagagtgaggcagcaggttgcccacgaccgtggggtcagggctggacagcagctgggctgccaggcgcagggaacagggccccccggctggaggctcgaatgaatggggcccacagggaggcgcctgcccctcaaaggctccgcacagtcaccgtgtggccccagctccattcccaggatcttcctgagggaacccgaaactcagatggatgccgcggggctcgggtggtgagggtagagggtgctgagggacaggcacccggggacgggcctcaccttctgtggcgatggcgagctcttgatgtagaaggggttgttggcctgctcctgcttccgggcctctcggcgctgtgggacacagcttggcatgagcccgagagaagcgggcaggatacccctctgtggacgtccaccaccagccacccagctggggaaggctggatctctggctattttcactactgagctttcactaacagggaaaccaaggcccgcaattgggaagagcacgtattgggggaaaaggaatcgctaacgctctgggaggcagggacgcccatgcctccactgccagggtcagggccaggacccacagaggccgctgacctgcctcaaagactccctgggacaggagggaggagacgagggctcgccaggggcagccagcagctcacccgagccagctcttcctcgtccgcctccgacggccggtgcttgggacgccgctgctcctcctcgtggaagacggccctgggcctctcgtcctctgactcgctgtccgagagtggctcattgatccaggcgtccaggtccaggctgcaccggacaggagggccacacaaggcagtgtgtgaccgagcacgcgcctgcaggcgtccgccctgagcaggctcaccacgtgcctggccatgtgatatcccaaacagtggggcctgccacccacacagggccagcgaggcaggtgtcactgccccttaagaggacgcagggacccaggaagactgcggcagggtcacagtggggcccccacggcaggctcaggctgcctcagagctttatggcaagggtgggagcaggcccacttcgcagggagcatccccaggcagaagccagatcccagaaccagtgagagacctggtgagtccgtgtgagggatatacccgcctgaggcctccaatcagccccacaccctcctggctgttcaggggtgcaggagcccccgctgtgccaccaggcatcaagggaccatgtcagggccatggttgcaatgcccccacccccgtatccttacccttcggggactggaaccttcttctgggccttgggggccactgggttcagctccccagcaaagagagcgctgacctcctctgccacaggcacgtccttggcctgaagcttctggatgtgcttgaccagctgcaggatgcaggacgcctgtgggggacacaggggtcactgctggcacctgcccggaaggccactcggccaccttcagggacacggggtggctcagcccctggcacagtgacgtgtgggccccctggtacagccacatagccacagagagcccagccttcatgccgtctctgtcgtcatcatcctcgccaggaagcggcagaaacagaccagtccggaaacagaacagagatgggggcacaacagggagctttgcccactgcagaaatgcctcccatcaggtcagtgccccgacaccagaagcaccacctccctcggcccccgcgggctccccgcctctgtgctggctccaactcagacacagccaggctgggcagctccaacagtgaccatgggccaaggatcatggccagccccgagctaatgccaccgcacagaggagcccggggccacgccccatgcagccttgaagctgggtctcctcagccattggacaggctgacgccactcccgacctctctcacagatggccaggtgcgatggttcacacccgtaatccttgcactttgggaggctgtggagtgtggatcacctgacgtcaggagtttgagaccagcctggccaacaaggtgaaactccgtctttactaaaaatacaaaaattagccgggcgtggtggcgggtacctataatcccagctactagggaggctgaggcagaagaatcccttgaacccaggggatggaggttgtcatgagctgagatcgcaccacttgactccagcctgggcaaaggagtgaaactccatctcgaaaaatcaaaacaaaacaaaaaacaagcagaaaaacagacacctgggaagtggtgggcaccgcctggcacaggtgtacagtctgctcaacctagaacccacgtcacctgcagccaccagaaagagccactgccagccccaggctctcacacctgctgtctcgccgcatgtgaaacaacctcttcctgtggccaggagcagcaccctcacatacccagcaccccagagacctgccccagtcctactgacggatcccccgtcctgctgacctccaggtcccactgactaaccccaaaccccagctggcacaagtggcaacaaaagaatctcagtgagtggcttcggaagaggaagcgaggccccgtcgacctggccgccactggacagaaaggcactgagggctccctgaggctcggcccaacacggagtgttggatcttacccgctcctgcacctccaggtctgcgctctgcacaaactggggcagccggtccaccatgagctgggtgacggcctgagcgccctctgcctccccggcctgctccttctgctgcaggatggaggcgtagagcttgaccacgttctgcacatacacggcctggatgtggcctggcagcgtggtgactctgggccgcagcatggcctccaaagtgtggtgtggttcctgcagatgcctgaggacaggaaacactgtgagcccccaggatgccaatcccggggctcctctctagcaggtgaggacctaggaggcctgggctcgtcaccaacaaggtgactctgggcccttcccattccctgagcggtctccaggggctgagacacgaagtagaagaaaccacaggccgtcaacagcccgtaacacaaacaaggcagagatgtggagatgacagagccactgaatggaggaaaggtcagaagaggaaaaaggacaacggggtcaactgtgcagctggccctgggaggataagcaggatgggcagggaacagacggaaccgggagaccctgatctgtgggacagtggggcctcggggtgcgcctcactggcgtctgacacaatgccttgggacttgaatatgtttctagtccacttttttcccaataagaaaatgatagaagtggccgggtgtggtggctcacgcctataatcccagcactctgggaggccgaggcaggcagatcacgaggtcaggagtttgagaccagcctggccaacacggtgaaaccccatctctactaaaaatacagaaagtgagggcgggcacggtggctaacgcctgtaatcccagcactttgggacgccgaggcgggcggatcatgaggtcaacagatcgagaccatcctggctaacacggtgaaaccccatctctactaaaaaatgcaaaaaaaattagcagggcatggtggcgggcgcctgtagtcccagctacttgcgaggctgaggcaggagaatggcgtgaacccaggaggcagagcttgca[137 bp omitted]aatacaaaaaaattagccaggcttgagcttggtggcaggtgcctgtaatcccagctactcgggaagctgaagcaggacaatcacttgaacccgagaggcagaagttgcagtgagccgagatcacgccactgcactccagcctgggcaaagcttgggagatagccagactctgtctcggggcgaggggaaaaaaagaaaatgacagaagtgctcatctccaggatgcaggctggctggggaccctttcgggatcccagaagtcaggcgccttcctgagccggggcaggcccagggtggggagtgctcggtgtggccgtgatgagcagcaggtagcggccagtggtggtgatggggccgggcccgaggcagtgaggcatagcagcaaatctcataaatttccaagagagcctggaaatccagactgctgtgagaaccgtgagtctcagcaacacattcccacctccaggcaggcccggtgacccgagcctgcccagcagtggctgtgatctgtcctcttggccagggagaacctgacattcctggagacggcaggggcagtgtcgataagacccatccctgcggcccacctggaacctggcactgagacccctgtgcctccagaggggcctggcgcaggcaggctggggctgagcaggtgcctccctgggccacctaactgccacacggagctcccacctcacctacagcaaacagggctcagaagggctgccacgcgcccagctggaactgagccttgcagatgcccagggccagccccccgtctgcagcccaccccatggatcctcccacctcccagtcctagtgcccacgggatctacaatctcctgggaacgccacagatgcccgagggcagagggcagacagggcagcacagactcgcctctgtaaagggggaatgggcccgaccattgtcaggggacaggtgctggaaacccacggacctgcaagacggccggggtggcagggcgatgggagacggtaggaaggatctgccaggcacatccctggtccctacccctcagaagcttggagaagctgccagcccagaggcccagcgcccactcactctgagaactccccgcagatccaggcggcagcgtacagcacctcacagatcccgttccgctgggtgctgctggccagcaggtgtgcactgtcaagcagcgcagacatctgggacacggcgaacttgcggatggccttcacgcggatggccacgtccagcatttgggcggcgatgaggtggccgtgccgtgtgccctccagccgggtcagctccaccaggatgctgatgtacctgtggggcagaggcggtgagtgagcggcgccacggaacccccggccacacccctgggagcgggacgcaccactcgaagttggtgatgtactggtagttggactggctgcagatgtcaatgatcttggtgagcagctcgtcacggtaggtggtaccctctgccttgtctacgtgggtcatcagcttcttcacgatctccatcaggttcttcttggacacctgggcaaaagtgtacagacagtggtgagagcggacccagcctggggcctgcttggtgagacacccaacacctgctcctgagacagaatccacgggacacaggcggacccggattcacagatcgatgccagggaggcagcaggcccctgcgatgtgggctgggttagaggcacacgaccccagccagggagcaacaactggcccagcacagtctgttctgcaggctcggccccgccccctccacacaggccctggaagacaggcatggaccaggactggcgcccctctgccctgccccaccacactaactgatggccgagtgtgaggggactccatgcattccacgtggctctgcacctgacacttaatgtcccttagagaactaaggccaggcgggcgggcggcggacagagggcacgcaccatcccatagagcaggtccagggcccgcagccggatggactcgtccttgtcgtccaggcactgcaggatgaggtccttgtgggactgcacggacttggggtgggtcttcaggatcttggacattgccagcagccccaggtacttcactgcagagagaggccagagccgggtcactgggacggacacaggcagcagggtgcaggcagggcccacggctctccgggccgggtctccacctcgggaggctgcctggccttggcaacctgggggtggacagagcaagtatcccagctggagctcaccacgagggatgtcgccctagcagagccccctccctgggagccggggtgcaggctgcccccatgccggctccctcaggaaggcctcccctacctactaccacgttgtagtagctgctgtcagctctcctcttcccacccagccagtgcagggaagaacgcagagaagactttccagcagcagcagcagatacccttggcccaaggcagggtctcacctgtacccagtactcactgttcacccgactagcccaaaccagctcacggacagctaagggtggctgggcatgaggcacagatgccacaacctaagccagggccaccccagccacagggcacacagctgaacccattcacatactgccatccacggtggctttcaggccacggggcagcactgagcagagacagacaccgtgaggtccacggagaaaacgcagtagtccccacctacccgtgggggatgggcccatgaccccagtggaaggctgacacggcgggcggtactgagacccgcgtgtgggtgtttttctgacacgtctgtgcctatggcgaagttcagtgtgtacattaggcacaataagaaatgaacaactaatagtaactaagaacagaacaaccataaaacacggtcacgaaaggtatgtgatcgcggtctctcttgcaatacccgactgtggggtgcttgcctatttttggactgtgttgggggtacctgaaacctcagataaggagggccactccactatctgggctgttgcaggcgagtttgccaactcctgctctcaacaaaaagacctggcttcaaaatgagcatccaaaacaccgcccaggtacaaggtaccaggcaggggccgctaattctgattcctcaacagagcagcacgggggcacccacatgcaggcaggcacctgggcaagggtgctgtgtgctgctctatctcacaacgcaaagcctcacgcacccccgcaaaaacatgcagaggctgaaatatccagaaatttcggaccaaggtgctcagtgagtggcatctgtccaactgccaggatctccccagtgggggcctttgccatgccccctgcatctcccctgggactggggctcagaggagctggtgtttcccagccaccccacgcagataggtcggggtgcaagggcgccacagggcactggcagagggctgcctctgaggcagagtgccatccatcagggagacagctggggttgcagatgccgtgtccacttcctcctcacactaggaggacccctaacttcacagagctggggacacgaaaatgacagcactggggaggggatgactcacagttctgatcggagtcctcgatcaatatccttaatttctgaacacaaagctgaaaagaagaaaaaaacgatgctggttacatcctctaaaccaagggtgagtcccacaggtaccctccagattcaacctcaacctggcctaaggcccggcgtcagccccacccaccaatcaaagcccaggagggaaacaagcatggcccacatggggcactggagacaagggaggccctgcttcccacgggcgctctcccccactcctcagtgccccatgcatccaccccacagacacatgatggggatcccaagcaggctcgggtaggtagtgcacacaggacgcggctgtgccctcccaagccgcaagatggcgtggggggaccagcaccttggtcacagggtgggcaagctcccgcctgtggaaaggtgtggcctctgcagtgtgggaccccatgggccccgcccagtgcgggacgtacctggatgctggcgctgtggttgggcatgccggaggacagcgagatgagcactgcaacagacagcttggtcagcaccacggtcagcaccatggccagcgccgacaccaactcagggccacggggcaccagcaccccctcgccgggaggagggatgggagggaggacagaaatgccactgagtttgggaccacgcagcccaactgtgtttgcaaaaacctagctccatcacaggcctgaggataggaacctgcaggggcccccaccctcactgacaggatggctcggggcctcagctgttcctgcaaacactggttcactcgcaacccctgcttccctctggagtctggaatcccggcaggggccaggccccgaggccacaggaccagaccctgtaggaacccaggcgctgggtctctgggagcctccatggtgacacttcacaaattatcatcacagctcactgctgggggatgaagcacatccggcaggactccactgaaagaaggctctagaagctgggcctggcctccccaacatccccggagccattcccctttgctgactctgctgcgtcctttgggcagggacaggcaggcagcgagaagccgaccctcagagccccagctctaacagctttaaaagaaagacatgaagccaggggaccgccaggcacatgcagggacagagactcattttccaccaagccagtggcatggaatgaaggtgtacaggagaccgtgtgtgcgtgtgcgtgtgcatgtgttttctttttaagacatgggttcttggaagctaagctatgaggacgcaaaagcataacaatgatctaggccaggcgcggtggctcatgcctgtaatcccagcgctttgggaggctgaggcgggcagatgacctgaggtcaggagttcaagaccagcctgaccaacatggagaaactctgtctctactaaaaatacaaaaataagcgggagtggtggagcatgtctgtaaccccagctactctggaggctgaggcaggagaatcgcttgacctgggaggcagaggttgcggtgagccaagattgtgccattgaactccagcctgggcaacaagagagaaactccgcgatcccccccaccgccccaaaaaagaatgatctaatggactccagggacttgtgggaggtggggggtgagggataagagactgcacatggggtgcagtgtacactgcctgggtgttggtgcacataaatctcagaaatcaccgctaaagaactgatccctgtaaccaaataccaccaaatgccgcccaaaaactactgaaataataatttttttaatacaaaaaatacaaatatctggaaatgaataaccctggacagaaagtctacatataaatgtaaatacgaacgaagaaatgtggcaaaataaatgcatattcacgcatgcaagatttcagaaatgtcacacccaatctttgtaggagtgttgtttttttgttttgttttgtttcgttttttgagaagaagtttcgctcttgttgcccaggctggagtgcaacggcacaatcttggctcactgcaacctctgcctccctggttcaagcaattctcctgcttcagcctcccaagtagtcgggattacaggcgcccgacaccaagccctgctaatttttgtattttttaggtagagatggggtttca[143 bp omitted]tttcttaaaataggtgtatagattacccaggtaggaacaaatgtattttaaacagaaatgtaggccgggcgcggtgtgtagatgtgttaattatctgaattgtgctatttgacaatctagaggtgtaccttaaaaatataccatttttaattgtcaactatacctaagtaaagctagaaaaaaaaaaacaaaagagatggggtgctggctgagtacagtaactcaggcctgtaatcccatcactttgagaggtcaaggcaggaggatggcttgagcccaggagttcaagaacagcctgggcaacatagtgagaccttgtctctaccaaaaattcaaaaaattacctgggtggggtggcatgcgcctgtagaagcaagaggactgcttaagcccgggaggtcaaggctgcagtgagctatgatcgcaccactgcacaccagcctcaagagagacggggtctcactctgtctgcagcctggaactcccgggctcaagtgatgctcttgcctcggcctcctgaatagctgggccctcctactggtgagaagcttctgctttatcaaccataaggaagtccaccgcccaatgccccgtgaggctttggctgacttggagcagcttggcagagaccactggggacattggtcgttggcccttgtgccctggcccagccggaggtgtggat[133 bp omitted]aaccccgtgtctactaaaaatacaaaaattagccaggcgtggtggcgggcgcctatagtccctgctactcgggaggctgaggtaggagaatggcgtgaacctgggaggcggaggttgcagtaagccaagttgcgccactgccctccagcctgggcaacagagtgagactctgcctcaaaaaaaaaaaaaaaaaaagaaagaaaaagaaaatatttttgtggtagatgctgctatttaagtatccacgggtgaaacgatatgctgtctcaggagtgctttaaagtctcagaaaaaatgcagtgtactgtgagagcggatggcaggccctgagcagcaggggccggcatctgtggaagcaggtatgaggaggggctttatctgcaggtgaatctttcatacccaaggggactccagagtggctgggccaccaggcagcttaagaagcaaacacccagcaccaatggcggtggaagaccaggcagacgcatggccaccttgacagcagaggcctgggacggactcccagccagccccaggccccaccagccagctttccttctcagttccagcaggggtggcgctcggagacaccaggcctggcgccctcctgtccccacctgagaccccagcctggcagtgccagcccttccagatggggagagtgccagttctcacctgcaatcacggtgttcacacattcatagaggagagacatggcagacgtgctaaggaaaggaacacagggaagcggcatgaggactgggggcctcgtcagatgcagtgacccagtgccggcagctcagctggagacggcctccgccccacggctcagggagtgtgccccaggagggagcccgtgccttgctctccaaggcctgtggtgctcggctggtcatcgtctcatcttcccagaaagggcaggtgagcaatccctctgcaactgcaggcccgtgacagcatccacgcagggacggaccacgcacccccggcggcctgtgagatggcaataccgccttcctactgcatcttttctagagttttttttgttttgttttttgtcttttctgagacggagtctcgctctgttgcccaggccggagtgcaatggcgcggcctcggctcactgcgacctccgcctctcaggttcaagcggttctcctgcctcagcctcccgtgcagctgggattgcaagcgtgcaccaccacgcccggctaatttttgtattttttaggtagagacggggtttcaccatgttgcctagactggtcttgaactcctgacctcaagtgatctactcgccttggcctcccaaagcgctgggatcacaggcgtgagccacagctcccagcccttttcggtgtttcgatgtgttcagacacacagataatcaccatggagtcgcagctgcttacagctttacagtcacctgcagcgtagggccgcagccaggagaatggccacgcgccatagcctaggagtgtggcgagcttcagcagtgaagtccgtgtgcgcgtatgctacactgctcacatggtgaaatgtactaatgacacccttctgtgaatgtgtccttgttgccgacacatgactgcatctgaaagtcatggcgatgacgcctctgcctgcggcccactgcacccctccccttccctgcagtgggggccggggaggggtcctggctccgcctcagcacttggtctgaggaattaaagtgtccccttctagcaaccaaaggcagcctggcctgaaaaggctcctaacataggatcccattccacaaccttgcagtgcggagacccacaaagaaaacccaaactccccaaacgtctctaagcagcatggagaagagtctagtggccgggaatgccactacaggcttccagtctaggacggacagtcatctttcagctgcttcacgcccagcccccgctgtaccgcactggggccgggcttgcagccactccagcactgcaccccgtggagccggcccgcccccgccgctccgacactgcaccccgtggagccggcccgccccacagctccgacactgcaccccgtggagccggcccgccccacagctccgacactgcaccccgtggagccggcccgcccccgccgctccgacactgcaccccgtggagccggcccgcccccgccgctccgacactgcaccccgtggagccggcccgccccacagctccgacactgcaccccgtggagccggcccgcccccgccgctccgacactgcaccccgtggagccggcccgccccacagctccgacactgcaccccgtggagccggcccgcccccgccgctccgacactgcaccccgtggagccggcccgccccacagctccgacactgcaccccgtggagccggcccgcccccgccgctccgacactgcaccccgtggagccggcccgcccccgccgctccaacactgcaccccgtggagccggcccgcccccgccgctccgacactgcaccccgtggagccggcccgcccccgccgctccgacactgcaccccgtggagccggcccgcccccgccgctccgacactgcaccccgtggagccggcccgcccccaccgcgcatggcctgcactcacctgtggatgagattggtgaggggctcgatcagcttcttgcccagccgcggttccaaaggagtaagagcaccgaactgtggggacagcagggcctcggtcacccgcagggaatgccccacgcagggtgagggacagggggggcctcggtcacccgcagggaatgccccacacagggtgagggaatgccccacacagggtgaggaggccacattcccgggcagtacttgccagcttgatgatcttgatgaggacccagttgttggtggaggacgtcatcagcttgaaaaagagcggggccagggacaggtagttcttagggttgcgtctggccagctcgcagatgacattgacggcagccgactgaacccctggggaacaaggggttctcatcagcatgcctgtccttccacctagaaaaccatcctactgtcttcctggcccgcgaggaagttctggggcctgcagcagctcccactgaacatggccctggctctgccacctcctcctggtgacagggacagcagccacagacctgatcctccagggaacaggccacagcagccagctcctggcgctgagaaagcattgctcggcactgttgccaggaacaagtgcgcacaagcgtcaccaagctcaggacagcctgacagcggccctctgagtgggggtttcagcatgagggctccagaaacagctgcccagccatcggggctcagggagtcttcctgctgcatccatgcccaccactccagggagaagctcgcccatcgggtcccgggcttagggctggggtctcccctcctgcacacagggccttgggattcctgtgggctggctttggggtccaccgacccacgcctgccacacgccagaggcttcacacaccagcccagggaaactcagtgaaactgaatctgcagccgcgtcccgcagtcaccacaccacaaatacacaacagctacactaggtggaggcagctcctgcacgggacatatggtctagaccatcccctgccctgtggaaggtgcctcctggtggcactggtcctaagaggggctggcgggggtgggtacacctctgctcagggacacgccagactcaccgccagctgccacattggatcttactgcccccaccaccagcacctccctcctggctgccccagcaaggggaggcccagccacctccaacaggcatgttcctggactgagcccttcaccactccccgcagcaccccccaaaacacgccaccacctcttcccagggcaccggctgagcccccaccctcaaccctgaggcttaactcaaatccacaaaccggggtcggggtcctccagcttctccttcagccggggaaaggcagggcgcagcgactcggggtacttcaggaacaccttgtacatgatcagcacagccttcttcctgatgtagggcttggtgtgtgacatctgcggggcagcgggcttcagcctgcgcgggctttctgcgcctcatccctgctctcgcccctcccagccgcctcctccacagagaggagatgccctccagcccgacgctgtggctgcacaccagtcccaggggccacagaccagcatcttggatggcatggaagccagcctcactgtgcccctgactcaggcctgccctccagagagagccctcttcccttgtggccttcctgccccagggtcctgggtcccacagtgggaggaaggctggagaggaaagtcacacagggaacgagggtgtgctgggaacacagcctacagcccagctcctcacggctgtgccctgcgactgctcaaattccccagcgggagccctcccatctaacaggcccagggagtcgcctcgaactgcctggtcctgacagagccaatccatgatggggcactgacatccaccctctcgtgggctccccactgctttactctagaggagccggcactctgtgaaggccagcagtcagtgttttcagcttcatgggccagacagcctctgtcatgaccacacagctgtgccttcacaaccaaggccaccagagacaacacaacacgtgaaaagaaggtgcagccggctggatttggccctgtgccgcagcctgctgatccctgatctagaagcttagcaggctgtgctgacaatctccaagaccatcagccacgatctagacacctccaggtggacaggcagccacatggggacggcgcccatcggccacgatctagacaccaggtggacaggcagccacgtggggacagtgcccatcggccacgatctagacaccaggtggacaggcagccacgcggggacagcgcccatcggccacgatctagacaccgggtggacaggcagccacgaggggacagggcccatcggccacgatctagacacccggtggacaggcagccacgaggggacagggcccatcggccacgatctaggcacccggtggacaggcagccacgcggggacagcgcccatcggccacgatctagacaccaggtggacaggcagccacgcggggacagcgcccatcggccacgatctagacacctccaggcggacaggcagccacgcggggactgcgcccatcggccacgatctagacacctccgggcggacaggcagccacgcggggaccgcgcccatcggccacgatctagacacctccgggcggacaggcagccacacggggaccgcgcccatcggccacgatctagacacctccgggcggacaggcagccacgcggggacagcgcccatcggccacgatctagacacctccgggcggacaggcagccatgtgaggacagtgcttcccagggaggaaagcatgcccgctccacactgttaatctggctactgtgttttaaatgaaaaggaacaaaggtcccctcatgagctggaggttaagtcaggcacaaaacagatgtttctggggccaaaatttccaggggcttcccaggttttagactgtcacagccgggggcgtagcctttgacaagcagagtggcaaggaggagtcaagctgtggccagggatggaggaaagaggaccacacagaagcccactggcagctcagacaggagccactgtcagacctcagggcaaacatcccccaccgtgcctggcctgtcagggacaccctgttgctcctctcggcaagatgatttcaaatatcaacttaagacacgcaggaaccaaagcggcccaagagccgctccaccagctgacagtgatttggttcccatttcaggcaggccacgcaccggggaccccggccggtttccgcatagccaagcttcccaggcatgccactttgaccgagtttttcccagagcagacatgcaggggtggtgggcaggcttacaaactcaccagtgtcatgatgtcatttgccaggtctctggcaaggtctggggtgacgaagcaggacagacccgtcagtgcaacacctgtgtcgtactggctggggctgctcaagtcctggaaagtgagagaaaggggccgtggccaggatgccctgggtggcacatccgacgcctgggtcaccaggagcagcaggagcgaaattctcccaggatgccccaggactcggcatatcctcttggggtgcagctgtgccttagcacccctgctgctgaggggtctgaagctgaactcggacaaggaggaagaatttacagcccatgggagactctgtcaccaagagaggagccgggatgggcgcggctgggaacagtgaggtctgaggcacaggctgaaacgctctgtgggtgggaatcaaccaagtttcttggctcctcctggatgggcagggctggggacagagaggtctgaggcacaggctgaagcactctgcgtgggaatcaaccgagtttcctggcacctcctgggacagaggcgcctgtcacaagtcactccaagtgtggggaagggccaccccgggtgcaagagcagagcgttccaggcctaaaaccagggcttccctcacgtatcactggcagctcccagcttgcagagacggcggtgctgggcctggcacagaatgggcaggaaagccccacaggatggggtcctcagagaccctgctcccatttggggtccctttccgcaacaactgaggggaagggcccaggaacagctcccatgggtccctctcaaagttcagctggcagctgcccacgccctcccatgaactctgccccagctcttcactcccgcagctctcactaaaacacggaatctgccccagctcctgtgtcagcacttggggaaataaatcctctcttgatatcacaaacctgctcttggggagagatcttcttaaggaaactcccgagacttcatctatatatgcatctaccaagatccgttttcagggttaatattctgtggtcaaaatatgacaaggccagcttttttttttttgagacgagtctcactctgtcccccaggctggaatgcagtggtgcgatctcagctcactgcaacctccacctcccaagttcaagcaattctctgcctcagcctcccaagtagctgggattacaggtgcgtgtcaccacgcctggctaatttttgtatttttagtacagatggggttttacc[264 bp omitted]cacggtggtgcacacttgtagttccagctacttgagaggctgaggcaggagaattgcttgaacccaggaggcagaggttgcagtgagccgacattgtactccagatggcgacagagtgagactctgtctcaaaaaataaataaaataaaataaaataacacagtgagctgaagtggtggcacacacttctaatcctaccactttggaaggccgaagcaggaggatcacttgagcccaggggtttgagaccagcctaggcaacgcagtgaaaccctccctgcctctacaaaaaatacaaaaaaaatcagccaggtgtggtggtgtatgcctgcagtcccagctactcaggaggctaaggtggggagatcgcttgagcctaggaggtcgaggctgcagtgagctgcaattgcgctactgctctccagcctgggtgacagagcaaaaccctgtctcaaaaaaaaaaaagtaagaaaataattttttttagggctgggcgtggtggctcacgcctttaattccagcactttgggaggccgaggcaggcagatcatgaggtcaggagttcaagactagcctgaccaacatggtgaaatcctgtctgtactaaaaataccctaaaaaaaaaaaagaaagaaaataattttttttttttgagacggagtctcgctctgtcacccaggctggagtgcaatggcacaatcttggctcaccacaacctccgcctcctgggttcaaacaattctcctgcctcagcctcctgagtagctgggattataggcacgcaccaccacgcccggctaattttgtatttttagtacagacggggtttcaccatgttggtcaggctagtctcaaactcccaacctcagaagatccacccgcctcagcttcccaaaatgctgggattacaggcatgagccaccgcacccggcccaggaaataattttttttattaaaaaacaagccaggcgcagtaatcccagcacttggtgaggctgaggtgggcagatcacctgaggtcaggagttccagaccagcctggccaacatggtgaaaccctgtctctattaaaaacacaaaaaaattagccgggtgtggtggcacatgcgtgtactcccagctacttgggaggctgacgcaggagaattgcttgaacctgggaggcagaggttgcagtgagccaagatcacgccattgcactccagcctggacgacagagcaagactccatctcaaaaacaaaataaaacaaaacaaaacaaaaaaataaaataaaaaacaaaatgaggccaggcacagtggctcatgcctgtaatcccagcactttgggaagccaaggcgggcagatcacttgaggctgggagttcaagaccagcctggccaacatggtgaaaccccatctctactaaaaatacaaaaattagccaggcatggtggcgggcacctgtaattccagctactcgggaggctgaggcagtagaatcgcttgaacccaggaggcagaggttgcggtgagccgacatcacgccactgctctccagcctgggcaatagagtgagactcagtctcaaaacaaaacaaaacaaaacaaacaaatgacacactggactgcaaacatcggaagcacgtgatcctacacagaggaagcaggtgctaactggctgagccagggcccacctgcgtccgaggccaggccaggggcaggcaccaggtcagagccgcgcccgacacacagggtctaacagccctgagcacctcgcaaggcagcggcggatctaagtccccagtgaggtgctcacacagggaccggccgtgccgagcccatcagcaagagacacaaagctgggcacgacacgtggccctccttgctgggcagctgccacctgggtacctagggcggctggagccctccaccctcctccctcccagttaccacctgcaaaacccgcccccatcctcctcttagcgggccagactcccgcccaggccccacctgctacacggccacgacccaaggagactcccgcccaggcccctcccgctacacggccacgacccaagaagactcccgcccaggcccctcccgctacacggccacgacccaagaagactcccgcccaggtccctcctgctacatggccatgacccaagagccccacggcatctagggcgcatgtcgcccgcggcccaggcgggacgcccagctctataaccttgcccacaacggtgagcccagcagagccaacagtcccaggacctgcaccacaccctgtgccggacatcagtcacagccagtgcccccacacctgtccctcggcgtgctgggagcccccagcccaggacttcaggtcacactgtggggtcgacaacacagccacagggtcccgcccttgcacatggacattggagagccgggaccgtggcctctgacgtgcggtctggggccagaaaggggccagctgcccatgaaaagggtgggcctgattctccaacaccccaacccctctattgagaggcgggaaccaaaggtgttcagagctcggggccaataaggacctttactactacccagtggcctccgtgaccatttcaaaatgcaacatttacatggtgctgaaaaatgcacctcgtgggactcaaaaaaagccgcgggcaggaagcaccccacatgggcagggaagggcccacagctacaccaggcactaccatgaggggagaagggaagaaagtgggtgaccgcagaggccagctgcgagtggaccctggagccccattcgccggcccctccaggtggtgagcgagggaagggggcaccgcaccactcagcatccctccacctcacaagcccaccagggagcgcaggctcagacccgccgggcctcctctctgcgtctgctgggaggactgtggctccggaagccccgctcgcactcaagggggccacaggcacctgctgcccacaggaagacgcgtgtgggaaccagacgctccggcaagggcagactgcactcagcacagagcggccccggcccgggaacacccaccttacggatctgattggtggtcagcatgatgacgtcggtgccttcgtgaaagctctgggaagcagcgaggtagccaattcgctgggagagaacagatgagcacatcagaggcaggacacccgcagcctccaggagctccagctctgctctgcagcgaccacaccaggcagcgccagcccagaagcaacaccctgcagcctggacgctggggccaccagcaagtgggaaccaacccgcatttgaaaaccaacgcagatttcttcaaaattccatgaggaaattcccagtttggaatatgtatgtgtttttttttttttcttggagacaaagtctcgctctgttgcccaggctggagtgcaatggcacgatctcagctcactgcaacttccacctcccgggttcaagcaattctcctgtctgagcctcccaagtagctaggattatagccgcgtgcgccaccacgccccactaaattttgtatttttagtagagatggggtttcaccatgttggccagcctggtctccaactcccaacctcaggtgatccgcctgtctcagcctcccaaagtgctgggattacaggccactgaatccaccttgggtaacagagctagactctgtctcaagaataataataataaaaattggccagtcacggtgcctcacacctgtaatcactccccaccccaccagccttgccgtcccagaacctcaccttgaaggtgaacttggaggcactcatcacttctatgatgttgaaggcggcccagctgatgtcgtatcccaacatctgtaactgttaagggacgcacaggaaattgcactcacaagccaaagcagagagaaaggttttgagccgcggcatcaagcgctccctcccagcacacggtgctggaacagactcattcactgtcagcaaaccacccaatacgtacccctggggcctttaatttcttcttttgacaaacgactctgacatttaaaagctacagggacaagttagtaacaggcactaaaaagagactcaatgtctgcaattggttaactggcgcttacgggtactggctacattcccctaccaacccttggcgaatcggctccttgaaatagttacgagacgagcagcagcatgggggaccctggacgagccctttgtctcgtcctcccacggggaaacgggccagagggaggagtgcctgtccccagctcacgcactgacctggaactgcagccaggaaaggagccagccctggaaggtccagggccctagctctccccactaggtgtcctggcccagcctgtggtgggagggagccgagactgcaggcgaggggcgtccccagtgaatcccacccagaagaggaccccatggggctccctcagggctaccaccagggcctgtgggttgccaccctctggcctgtttgccagccatgtgaccaacatggctttctgctccaggactctgggttggccctgagtggctcaccgacagcaggtggtaccaatgactgacaggtggacagacaggctgatgaataggggacacgtgctgagtggagaagcagcccgacagtgctgggcgctggccactgggaggcacttacatacgtcagcttgcagaccgcgttcgccttcaccgctatgttgtcctgcttcagctcctgcttgatctcatcaatgcactgagatatgtattttgcctataatgggggataaacacagagat[142 bp omitted]aaccccgcctctactaaaaatacaaaaattagctgggcgtggtggcgggcgcctgtaatcccagctactcaggaggctaaggcaggagaatcgtttaaacctgggaggcagaggttgcactgagccaagatgacaccactgcattccagcccaggtgagagagccagactccgtctcaaaaaaaaaaaaaaaaaaaaaaaaaaaggaaagaagccaggcataagagagagcacaccgtgtaatccatttctatgaaatgtccagatcaggccaatccagagacaggaaggggattcgtgggtgccacaggctgggagaggagacgggagggttcgctttctttctaggctgataatgttctggaacttggccgtggtggtggcgcacagcattccgctatacacgccccaccgtttgccaactccttggtggacgaacatgtggggccttcccaccttcagccagggtgactctcactgctgtgaaaaccacactcaggttttgaggggatgtgtctggtgtgtctggatccccctgggcctgctcactaactgcgcgtgtctccagaacaccatcaaggacaattctgacccaagcgaactcaggcacgaggtccagaatggcagacaaggttcccaagggacaggcagacgtgaggcgcccaacatagcaccagagacaagccgagtcgatgccatgctggccccagagacaacccaccccacctggaaggagaggagggagcagcagaggcttggagtgcctccatcagtgaacgatgaggcacccacaagccctcctaatgcacaggagcccctctccatcatccgacaggtcaggagtgacggctgcccgggccccgtcctgccagcccctacgtcgggatgcaatgttcctcctgctgtgcccaccagaggcaaggatggcaagcccaccccatcacgcttctgtcctcagccccactgtagctggcctcgaagcagccccaggagtacccaccactcatgtgtcacccaggaccacaccccaacctcggctgccagctgcaccgggctggggaaggagacacagctgtgggggagtgggggggtgggggagggcacagacacataatattttcctccatgctttatgatccaactttgtacaatggaaagagtgccacccgatcctccagacgggcttcaaattactacacctcaccccaggactgtgctcccatccccggagcaaggataacccactcctcctgctcaaagggtcaggactgttgatttaaaaggaaaagaacaaaaagaccatcccaggcgtggagaggtcagaccctcacgagggcaaaggggatgtcaaacggcgcggctgctgtggaaagcagcctggggttcctccacggttccatgtggagttaccgccccagcaattccacttctgggcgtgcacccgaggggatggaaaacaggtgtccaaacaaaaacaagcacacgaacacacagggcagcaccatttctagtggcctgaaacaggaacagcccccacgctcgccgctgatgaatggatacacaccatgtggtgggtctgctccagtcaacttgcttgactttttttttttttgagacagggtctcactctgtcgcccaggctggagtgcagtggtgagatcactgctcactgcagcctccacaccccagactcaagtgatcctccccgctagcctcccaaagcactgggaccacaggtgtgcgccaccacgcccagccactagtcagctttctaggaactcggcagtgggtcacaaccctgggactccctcttggcttttaacttctgataaagtccaagtagctcctctcagaccaagcctcacacaaacgtcttttttttttttttttttttttgagacggagtctcgctctgatgccaggctggagtgcagtggcacaatctcggctcactgcaaccttcacctcccaggttcaagtgattctcctggctcagcctcctgagtagctaggattacaggggcacaccaccatgcccagctaattcttgtatttttggtagagacggggtttcgccacgttggccaggctggtctcgaattcctgacctcaggtgatctgctcgcctcagcctcccaaagtgccaggataacaggcatgagccactgcgcccggcctgaattagaaaaaaaatgtattagttggggtagggagacatgacctagacccaaaagattatattataaacatagatgtaaattagctgaagctataatgtggctatacatcattgacactttctacaaaaacaccgggaaatcagaggagcaacatggtgaaatttctcaaacacctcagctagttccacactaaattcacacttcaccacacagcaagtgagatactaaaacaatgatgctggtctcagcatctatttaattctgggatgtaatttagaacacagggtgcgtatttcctttatacactaagtcctcaggactgcagtaagacaggccatttaaaccctagatacacaggaaaactccctggggtacttttttttttttttttttaatggagtcttgctctgtcaccaggctggagtgcagtggtacgatctcggctcactgcaacctccgcctctcggttcaagtgattcaagtgattctcctgcctcagcctcccgagtggctacgattacaggtacacaccaccacgcccagctaatttttgcatttttagcagagacaggatttcaccattttg[132 bp omitted]cacaggctaaagtgcagtggcctaaccatggctaactgcagcctcaacctcccaggctcaagagattctcccacctcagtatttgggagtacagtaaatagctgggattacagggccatgccaccatattgggcgaatttttaaaattatatatatttatatatatttatttttgcatatatttatgtatatacttgtttacatatatatacatttatttacatatatgtttatttatatatatatatgtatcttttgagacagagttttgctcgtcgcccatgctggagtgcagtggtgtgatctcggctcactgtaacctccgcctcccgggttcaagcaattctcctgcctcagccttcccagtagctggggttacaagcaggtactaccacgcctggctaatttctatatttttagagggggtttagccatgttggccaggctggtcttgaactcctgacctcaagtaattcgccagcctcagcctcccaaagtgctgggatttacaggtgtgagctactgcacccgacctaacattttttacttttgtagagttggggtctcactatgttgcccaggctggtcttgaactcctggcctcaagtgatcctcccaccttggcctcccacagtgctgggattaaaggtgtgagccaccgcacctggctggcgctttttctagttttaaacttccgattctcagtccttcgcctccaatgaattaagtcagcatcttgagaccagggaggccacatggtcacaacctcagcagctgattctcaggtgctgtccagttcaaagaccaacgagctgagcccttggcacatcccacggtgctttccacgtggccgcctggctgaggggagccgggccgctgagccgcatgcaggctgagggcctgggagctcacccagctcatgagagcaaagcccggtccccctcaccccaatgggggctctgaggggttttttctgttttttttttttctttttttatttgagacagagtttcactcttgttgcccaggctggagtacaatggtgtgatcttggctcaccacaacctccgcctcccaagctcaagtgtgattctcctgtctcagcctcccaagtagctgggattacaggcacgagccaccacgccaagctaattttatatttttagtagagacagggtttctccatgttggccaggctgatctcgaactcccgacctcaggtgatctgcccacctcggcctcccaaagtgcggggattacaggagtgagccaccacgcccagcctctttttcttttttttctgagatggagtctcactctatcgtccaagttggagtgcagtggtatgatctctgctcactgcaaactccacctcccaggttgaagtgattctcctgcctcagc[136 bp omitted]aagctccacctcctgggttcatgccattctcctgcctcagcctcccaagtagctgggactacaggcgcccgcgaccatgcctggctaattttttgtatttttagtagagacgggatttcgccgtgttag[132 bp omitted]tttgaagccctgtttcaaaaaaatcaaaaaataaaaaattagctgggcgtggtggcacatcgtgtagtcacagctacttgcaaggttgaggtaagaggattgattaagcccaggaagtcaatgctgtagggggccgcgatcgcaccactgcactccagcctgggcaacagag[161 bp omitted]cccatctccgctaaaaatacaaaattagccggggtggtggctcgcacctgtaatcccagctactcgggaggctgaggcaagagaatcgcttgcacccgggaggcagacgttgcggtgagccgagatcgcgccattgcacttcagcctgggcaacaagagtgaaactccgtctcaaaaaaaaaaaaaaagaattccaagtcccaacagtaactgagtcaggaaaggggacgcgccggcgaagtggtccatcctgcccaggataagttactatccacaatcaccatcacttcgaattcaaacagaaaagccaccaaaccccagaaccccagaagcagcatgaaaggagcttctcctgcggagcgctctgctctttcaacagcccgggacaccgtcctgctttattctcttgttgtggacaggctcaacgccctctgcacccaggagcagagcggccgcggccaccctgaggcagcatggaaccgaggcccccacaccgggacctacctccactcccacaactgaggctggtgcagcacactaacacgcaacagggcagaaaccagaaacagccccatccaggaccagaccccggccagccctgcctagtccagccccagcccgtctctgtgctcagtcctgtaacttgcggcccctcagctcagcctggatgtctgtggggtggcacggtcaccattaaaaccctctgagtcaaggcggggcacaatggctcacacctgtaatcccagcactttgggaggccgagcagatcacttgaggtcaggggtttgagaccagcttggtcaacatggtgaaacaccgtctccactaaaaatacaaaaattagcttggtatggtggtgcatgcctgtaatcccagctactcaggaggctgaggcaggagaattgcttgaacctgggaggaagaggctgcagtgagccaagatcgcaccactgcactccagcctgggcgacagagggagactatgtctccaaaaacaaacaaacaaacaaacaaaacaaaaacgcttctggctcaaatccacagagacagcaggtcagtggtcgccagggcataggtttctctgttctgaacgtattgtgctgaatcactgcacgtttgtaaatatactgaaatctacttcatttcatgcctagaacaggcagattttgtggcatgtaaattatatctcaactgttcaaagaaaggaaccaccttggctcagcagcatcacaggacaggacaaaacaccaggaaggacgtgaggctccatctggaccgcagctccctgagggctggaggcctgggcagagcagaggagggtcctcaggccccagtcacagatgagcaggagcattagggaccactcagcacagagtgggccacatggtggatgcccagcaggccacccggggtccccacatccctccgcctgtctcactgccacgtggacaaatcagccaccagccagtccaagaactcctaaggcagtggttcccagcaggtgactctgcccctccaggggacactgggcgatgtatgcagcatctgtggttgccacgacttgcagatatctaggcatggagtgggtggaggccgggtacgctgctcagtgccctgcagtgccccaacacccccaccccaagaacaatccagcctgatgtccacagtgccacggctgggccagagcacacccagggctggcgtcgccgctcctgccctctggtcttcctggctctccaaagctcaacgcaagtgagcatcacccagaagctggttacaagggcagaactcacccccacccacatgcccctccaggacccacatgcctcggccttgaagccacctccacacacacacaccaagccttctgcccagagattgccttttgaaaacccctgcaaaggagtaaaatagacaaagaggcccaagcctctttgaagagagagcttcaggaagaacgcaagcggctaaacgcctgtgaatgagtgaaccgcactcataagcagggcagctgacactacagctgcaccccccaaacaccccagccctgctggtggtgcgggaggcgaggctgcggctttcatgcttgctgctgggagaagctctgtggggagcgggcgctttcctgagggcctctacggcttgagtccattcataaaacgaccccacatggaaaccacccacatgtccgactatgtatggaagctgtgtgtaaacaacagagcacagccacccacgtcaaggaccgaggacagctccctccccaccatgacggctgcaaagcacacacaccttaggcaatcacgcctatggttcagggacacaaatttaagtgataaaactacaagcaagtcaaggaaattaaacttacagaagtcaggatcattaccataataattagctgtacaggccgggcacactggctcacgcctgccatcccagcactttgggaggccaaggtgggtgggttacttgaggtcaggagtttgagaccagcctggccgatacagtgaaaccccgtctctgctaaaaatacaaaaattagccaggtgtgatggcggccacctgtaatcccagctacttcggaggctgaggcaggagaatcacttgaacccaggaggcagaggttgcagtgagccaagattgtgccgctgcattccagcctgggtgacagacggagcaagaccctgtctcaaaaaaaaaaaaaaaaaaaagccgtacaatgtcctatgcactgcatattttgcaatcaaagcagctcagagggaaaacaaagcacatttagaatccacgccctctggtccaccaccaccgtgacagcacgggggacgagggcacctggacaacagggacgcattcgggaattctgggagacttttcttaccatcaaggggggtcaggggcttttaatttggggttgattctacctccaagagacattctggtctgggcacacctgtggctggcatgaccagaggagcccctggcacggagtgggtgggggcggggatgctgctcagcaccctgtagtgcccagaatagctctacccagagaatgatccagccccaacatccacagtggtgaggggcagacgctgatctagtggaatgactgacgttattaaaaggagagaaaacccgctcagttcggctgggcgtggtggctcacgcctgtcatcccagctctttgggaggccgaggc[131 bp omitted]aggcaggagaattgcttgaacctgggaggcggaggttgcggtgagccgagatcgcgccattgcactccagcctgggcaacaagagcaaaactctgtctcaaaaaaaaaaaaaaaaaaagaaaagaaaacacactcagttcaaatttaatctctttatatcttttcctttcttttttttttttttttagttggagtccgctggggaggctgaggcagggagaactgcttgaacccaggaggcggaacttgcagtgagccaagattgtgccactgcactccagcctgggcaacacagcgagactctgacttggaaaaaaaacaagaagaagaaaaaaaaaacaaaaaagaaaaaagaaaaagaatatatgggctgggcacagtggctcaccctgtaatcccagcactttgggaggcaaaggtgggcagatcacgaggtcaagagattgagaccatactggccaacatggggaaaccccatctctactaaaaatacaaaaattagctggatgtggtggcactcgcctgttgtcccagctgcttgggaggttgagtcacttgaacctgggaggtggaggttgcagtgagccgagatcgtgccactgcactccagcctggcgacagagcgagacttagtctcaaaaaaaaaaagaaaaaaaggctgggcaccgtggctcacacctgtaatccagcactttgggaggccgaggcgggaggatcacgaggacaggagattgagaccacggtgaaagcccatctctactaaaaatacaaaaaattagacgggcgtggtggcgggaggctgaggcaggagaatggcgtgaacccgggaggcacagcttgcagtgagcccagatcgcaccactgcactgcagcctgggggacagagcaagactccgtctcaaaaaaaaaaaaaaaaagaaaaagaaaaaatggagaaaactttcccaaaactatgaaaaggacttgtgagaacaaaatattaaaagtcgtttgttttttgtgccaattctatcgagctttagaagctgaggacactcccaagtggaccaagacacatacacatgagaccactacttctcacgctttttggactcatcttaataggttttgcatgggaacccgatacgtttacacgtacacacaagtatcacatgcagaaatcaaagtttcaggacaggacggttactgtatgtgcctgcactctggtctcttctagtttcttttcctttttcttacctagcataaccattaaattgaattcacaacccacaaagaggtcacagcctgaggactggaaaacagtgaactagacaacctcagcgctctggcgcttccagaaaaccgcgtgtcactgcagcatcctccgcatcatccagcaaggagggaggtgactgtcatccccatttacaagggaggagacagagcagggggctctagatgggccgccccatgaagtcagccagtcagcccaagcacctggactcggatctcccaaacctcatgcgatttctactccatcgcactgcctttccacgtggctttcaaagtcattgctaagccttgtttccatgatgccacactcaagttttaggtgaaaatctattacgaaatggaaactttttttggaaactatactgctgcagaaaatgcgcacactgtctagagtctttgttccgggtgcagtgggcgggagggaagaacctacaacatacggtctataggatagctgctttttcaaagtgagtgggggtgctggaggtacaactagaactgtcattgaacagtcatttgctgctctccaatcaggagactccagcagctgcagagaacatccagaatcagacatgaacacctgagttaccaccctctggaccataacaatcgtcttccagtgagaaagccagggtccccagacactgcgtgtcctgcctgaaatcacccacccgccaatggcagggccaatgaggaagcctgggactttcaaggacaaccctgcgccgttttaaaaatgtttcccagccgggtgcagtggctcacgcctgtaattctaacactctgggaggctaaggcgggtggatcactgaggtcaggagtttgagaccagcccgaccaacatggtgaaaccctgtctctactaaaaatacaaaattagctgggtgtggtggtgcatgcctgtaatcccagctactcaggagctggggcaggagaatcgcttgaacctgggaggtgaaggttgtggtgagccaagatcatgcctctgcactccggcctgggcaacaagagtgaaactccgtctcaaaaaaaaaaaaaaaaagtttccaccaccaagacccccttgaaggggcccagacttgtggggaaggcgctatcaactcacaccaattccaaaggaagaaaaccaggctcaggggcttcccagtgaagacaggcacatccccctgaaaaccatgccccagactagaggtgtggtcctccactggacagaccccctggcccatcgtcagggtcccagaacaggctgctcagtgacatgcgctgaagggagcagggacgggcgctgggagatcctgcctgtgcagaaaaagtcctctcgggaagtgaaccacatttccaatctgaaccaagctcagtaaaaaccaggcccatcagcgatgctttcaactcacaaagaatctgaacattactccagttagttacacgttgtaaccaaagcagttagggagagcttctgagatgaagaaaaccaaggaggccgaagggaagtggggtggagaagaacaaaaatgacctcattaaggtgggggcaggcgaagccacaccacttccaggaaagtgtaaaggtgtaacaatacggcaagagctcgggttcccagagagagggacatgggctgagggacatggtgccaggaagcaagtcccttaacttccctgccctcctgggcacctcgtcctggacacagcctctggtactgggactggtgcggtatcagacggcggctctctttcaggcctgccttgctgtccacgcagggaagcaggcaggcagtcgctcaagtaggacactttctaaggctcccactgcccaagggctgcacgggtatccttaatgaagccagacacgtggtggccactctgcccattcttcttcaatctaggtcacaggttgggggaagggaggagcgggaaggaaacgatccccacggttgtaattttacttctggaaaactatttcctcgccctggctttcaggttcctacttgaagtcagcttccccattccagcttcccgcaagctgctacctcactggggatcaggatgccgctgtccttcctccctcctggcagcagccccaccttcctgggaacgggggcactggaggcaacgccccaagaccctgcctggttccgagccaggcctcagggagcgacctggacacgcatttacacgacccagaaggaagaaggagtttctccagggacggcccaggaccccctgcctcggtctcccggggagggtccgggggcggggcccgggcccctgcatttttaatcggtgattcggaaacacactcaggttgaagaagctctgcccagagacctcgcaagtctcctgggagggtggcccgagacgggggcaggtgggcccgaatctccctctgagagagtaaactgagggtccagggggagggcacctataggcggggcccagggcattgcattttgaacagcgcttcccccaggtgatccgatgaggcgaggatccgagatgtgctgctccaaggccttcgcccctcgtggggaaactgatgctgggggaccgaggaggtgggcggcgccccaggcccaggccaggcagggccggagccctaagcgggacctccaactaagacagagcccgggcgggcggcaggccgagcaggcccagtgagcagggctgggccctgggccggggctgtgaccaggccgagcagccccttggcgcgccgggctcacctcgtcctccttgtggttacggatgccgcggaccaagtcctgcagattcttgtcgaacatgcggtcgatgctgcccttcaccatcttgagggccatcgcggcggcccacgggcttttgcctcgggaggcccgcggctgggcgccgtgagggggcccggggcccgtgcctgccgcccgcggagcgccgcgctgccggccgctgcggcggggcaagctcccaggccagggcggcggcggggtccaaggaccgcggcagaggcggcgacccgctcggcaggtgccgcgatcccgctccgggccccttgcaaatggcggacaagatggcggcgggtcagctgacgacgagcgcccggtcccagccgagccggccccggaagccccgcctcccagaaagccccgccccgccacctccccggcagggagacgctgcgtttccctgacgacgacaggtagtccaatggaaatgtggcacctctttctcctgcgcgcggccccgccttttccggccccaaaacttgcgctctcattggtcagtggcctccggaactccgccttcttcctagttctgagccctagccacgccccttagaggctggtcctgaccctcccaccagctgacaggtgtgagcgtggctggatgtgggcggggcgcccacgtggagcttagccggcaagttcccgaggaagactggagctccgcctttcctgaatgtaatagctgacgcggcctgagagcctccaaacccaactcctgggtgggtgggggaacggatcctgtggttcccgcagcctcacaacatcctgtgaaatgggcaagacagacattaacatgcccacaggaagaaaatgaggccagagacaggactacgacattgtcattcattcagtaaacatttgtcgaaggcccattgtgtgccaggcatggtaaggggtgctgggcatgcagcggtaaatgagatatactgagtccctgccttccga[131 bp omitted]aggccaacatggtgaaaccctgtctctactaaaaatacaaaaactagctgggtgtgatggtgggcacctgtaatcccagctattcgggagggtgagtcaggagaatcccttgaaaccagaaggcagaggttgcagtgagccgagatggcgccactgcactccagcctggcaacagagcaagactccgtctaaaaaaaaaagagagggagaaagaaa[132 bp omitted]aaccccatctctactaaaaatacaaaaattagccgggcgtggtggcatgcacctgtaatcccagctacttgggaggctgaggcagaagaatctcttgaacccaggaggcagaggttgcagtgagccgagatcgcgccactgcactgtactctgggcaacagagcgagactcttgtctcaaaaaaacaaaacaaaccaaaaaaactggggtaagatatttacaatacatatatctgacaaatgacttatatcctggtggggcaggatggctgacacctgtaaaatcccagagtttaggaagaattgcttgagcccaggagataaaggacagctagagcaatatagtcagacacccatcttaaaaaaaaaaaaaaaaaaaggcagggggaggggaggatgggcgcagtggttcaaaccagtaattccagcacttcgggaggcctaaagggacagatcacatgaggtcaggagttcgagaccagcctggccaacatgatgaaagcccatctctactaaaaattaaaaaattagccagacgtggtggagggcacctgtaattccagccacttgggagactgaggcaggagaatgacatgagtccaggaggcagaggttgcagtgagctgagattgcgccactgcactctaggctgggcaaaagagcgaaacatggtctcaaaaaagaagtggggggggggaccgggcacagcggttcacgcctataaccccagcacttcgggaggccgaggaggacagatcacttgaggtcaggagtttgagaccagcgtggccaacatggtgaaattccacctctactaaaaatacaaaaattagtcaggcatggttgtgggcacctgtaatcccagctattggggaggctgaggcaggagaatggctccgcccagggggcggaggttgcagtgagctgagattgccccattacactcaagcctgggagacagagcaagattccgtctcaaaaaaaaaaaaaaaaggaggggaactgctgggcatggtggctccatatctttggaggatgtattcatgcatttctatcgggaacagtagaggaatcgctgggtaatagaatatgtgtgcgttagcattgcaagctagtgctaaacagtttccgggcgtccttgtgatttctttcccctcgcccgagatagagtcttgctctgtagcccaggctggaatgca[139 bp omitted]ctcctgggttcaagcaattctcctgcctcagcctcccgagtagctgggattacagctgcccaccaccacctccagctaatttttgtatttttagtagagactgggtttcaccatgttggccaggctggcctcaaactactgacctcaggtgatccgccttccttggcctccccaaagtgctggaattacaggtgtgagccactgcaccagcctcagaaatatttatttatttatttatggttttttttttctttttttttttttgagacagtctcattctgtcaccagggctggagtgcagtggctcaatcttggctcactgcaacctccacctccctagttcaagcgattctcctgcctcagcttcctgaatagctgggactacaggcgctcgccaccacgcccagctaatttttgtattttagtagagacagggtttcaccatgttggccaggatggtctcgatctcttgacctcgtgatctgcctgcttcagcctcccaaagtgctgggaatacagtcgtgagccaccacgccccatcctatttataggttctttagtcctcaggcgaagccctagggaaacagaatttctctctccactttctgtcccttttcactgcccaaggcaggactctaatctgattgggagcccaaacacctcattccagagaaggtcatgccccataccctggaggaagaaaagctacagagagaccaagacaaatctggacagacaggccctgcctggctccccagtcagtctattcatatgagatcatactaatttttggcccaattacgtttctttatgattgtgagtcatgtctgtttaatgaagctgccattaaaacccaaaaggaggccaggcggggcggccagtgcctgcattcccagcacttccggaggctgaggtgggtggatcacctgaggtcaggagttggagaccatcctggcgaacatggtgaaaccctgactctattaaaagtacaaaaattagccgggcgtggtggcgagcacctgtaatcccagctacttccggaggctgaggcaggagaattgcttgaacccaggaggtggaggttgcagtgagccgagatcgcgccattgcactccagcctgggtgacaagagcaaaactctctcaaataaatgaaaataaaaataaaaaaacaaaattagccaggcgtggttgccatacctgtagtcccatctactcagggaggctgagg[131 bp omitted]tgtgtcacacacctgtaatcccagctactcagaaggctgaggcaggagaatcacttgtatccaggaggt[141 bp omitted]attttccaacacactgtgttttctacctagcattttgtttattattggtctccacctcctcctcccacctgaacacaaattctatgatattgggactttgtccttttgttttctgtatgggtggacatttaaaaaatgtttaacttgatgaaaaaggaagaatgggccgggcgcggtggctcacggctgacatgccagcactctgggaggccgaggtgggcggatcaggaggtcaggagattgagaccatcctggctaacacggtgaaacaccatctctactaaaaatacaaaaaaattagcccggcttggtggcgggcgcctgtagtcccagctactcgggaggctgaggcaggagaatggcgtgtacccgggaggcggagcttgcagtgagccacgattgcgccactgcactccagcctggacgacagagcgagactccgtctcaaaaaaaaaaaaaaagaaaaaagaaaaaggaagaatggttttgacaagagtgctgattcttccatcactgggagttggtgggctggctgcaacctccagggtgaccagcagagagcagtgctagccaggctcaaagtaggggcagcttctctctggaaagatcctggcctggagccctgagctctggcaggagatggggacatttgtcatcagtcctagctccagcccgaatcagttaccttgtccccaaattatccatcctttcatccatccttccacctccccatccacccagccacatatcaaatcatccattcatacatacatacatctacccacccatcatccatccatccaccaatccactcatgcatccattcacccactcttccatctatccatccacctacctatccattcacccatccaccgatccactcacccactaacccatccatccacccacccacccatccatccacccaccaatcaacaacgtttattgaaaaaaaacagggcagggcgcggtggctcacgcctgtaatcccagccctttgggaggttg[132 bp omitted]gaggcaggagaatcgcttgaacctggcagttggaggttgcagtgagccaagattgcaccactgcactccagcctgatgacagagcgagactctgtctcaaaaaactaaataaataaaacaaaactaaacaaaaaacaaacagccacccacccatccacccacccacctatccacccacccatctatccattcacccatccacgaatccatccatttatccatccatctacccatccacccatcaacaaggtttgttgaaaaaaacaaacatacacccatctatcattcatccatccacccatctgtcatccatccatccacccatccatctatcgatctatccacccatcatccatccatccatcc[370 bp omitted]tatccagccaaccatccacctatccacccatacagtaacccatccatccatccatccatccatccatccatctacccatctacccatccacccatccacccaccgactcatccatccacccacccactaacccatccacccacccacccatccacccatcaacgttagttgaaaaaaacaaacatccacccacccatccatccccatccacccatccacccacccatcaaccaacccacccatccacccatccatccattcaacaacatactgagtatctactgtatgccactttggcaaggagcaggaatggagaacaaagctgtaggcagcagcaggattggggaaaagtgatccaggcagatgtcaggacaaatggaagagcttgctcaagtttgtcatgtggaggagcagagaggagactggcaaggatagtggtgatggaggaaattgagcttgatgggttgataaaggacacattagacatcattctacagaagcattcatttagcaactatgttgtaccccacatgtgctctttttttttcttccctccacggctcagcagaattttgtttgtttgtttttgagacagagtcttgctctgtcgcccaggctgcagtgcagtggtgcgatctcggctcactgcaagctccacctcctgggttcacgccattctcctgcctcagcctttccagtagctgggactacaggcacccgccaccacgcccggctaattttttcgtatttttagtagagacggggttt[132 bp omitted]ttgctctgttccctgggttgtagtggagtggcaccatctgagctcactgcagcctcaactcctgggctcaagcaggggcccagctactttttgtgtattttttgtagataatgggtctcactatattgcccaggctgatctagaactcctggcctcaagttgtcctcccaccttggcctcccaaagtgctaggattacaagcctgagccaccgatcccagctcttttttttttttttgagatggagattcgctcttgtcacccaggctggagtgcaacggcgcaatccgcttactgcaacctccgcctcccaggttcaaacgattctcttgcctcagcttccctaggagccaccaccacacccagcatgaaccataatttctaatctccttgctaatctgttagtcctgcaaaggcagtctagtccccaggcaagaaaggagtttgtttggggaaagctgttaccgtctttgtttcaaagttaaactataaactaagttactcccaaaattagtttggcctgagcccaggaatgaacaaggacagcttggaggttagaagcaaaatggagtcgtctaggtcagatctctttcactgtcaacattttctgttataatttttttttttaatggagtctagatctgtcaccaggctagagtgcagtggtgtgatcttggctcactgcaacctccgactccgggctcaagtgattctcctgcctcagcctcccgagtagctgggattacaggcacacaccaccaggccaggctaatttttttatttttagtagagacggggtttcaccatgttggccacgatggtttccatctctctctctttttttttttttttgagacggagtctccctctgtcacccaggctggagtgcaatggcgcgatctcagctcactacaacctccgcctcccaggttcaagcgattctcctgcctcagcctcccgagcagccgggattacaggcatgcgccaccatgcctagctaattttttttgttttttttttttgagacggagtctcgctctgtggcccaggctggagtgcggtggcgcgatctcagctcaccgcaagctccgcctcccgggttcaagcgattctcccgcctc[168 bp omitted]caccgtgcccggccgcctagctaatttttgtatttttttttttttgagacggagtcttgttctgtctcccaggctggagtgcagtggcgctatcttggttcactgcaagctccacctcccaggttcatgccattctcttgcctcagcctccagagtagct[136 bp omitted]cctcccaaagtgctgggattgcaggcattagccactgcgcctggccattttgtatttttttagtagagacggggtttcaccatgttggtcaggctggtattgaactcctgacctcatgatctgcccgcctcagcctcccaaagtgctggaattacaggcgtgagccaccgtgcccagccttctaatttttgcaaaggcagtttcaaacctgtaacaggaactatgggaatgaccagaggaaatggctcaggaaagagatgtacaaaagtgggaggaggccaggtgtggtggctcaagcctgtaatcccagcaccttgggagaccaaagcagggtggatagcctgaggtcaggagttcgagaccagcctagccaacatggtgaaaccccatctctactaaaaatacaaaaatcagccgggagtggtggcgcatgcctgtaatccccgctactcgggaggctgaggcaggagaatcgaatcgcttgaaaccaggaggcgggggttgcagtaagccaagatcacaccattgcactttagcctaatgacagagctagactcctccgtctcaaaaaaaaaaaagtgggcggagatacaggttgccacacctggagtccagtccatcctccaccagctcccagtagcctatgggaggggcacaggcattggtccattcatccccaaagtgtgtcttagcccggataacctgtactcagtgatcctgaggatatagatagagtgcctgcctacacaggattctggagaaatcaactgttcagaataatgttagaccaggatctctcccctggagaaccacggacatcagggccagattgttctctggggtgggctatcctgggcactgcagggtggtaagcagcgtccgtggcctccacccactccatgccaggagcttccttgcaccttagctgtgacaatcacaaatgttcccagacatcgcccagtgtttcctgggtgcagaatcacccctggttgagaccgcctgggtaagggattccaagagcccccaagagactgcatcccatgatccaccaccctgctgaggtcccaggaggctgcccacattgaaatccacaccctgagtgggtagggagagagaggaggtgagtcctaggaccc[135 bp omitted]cacctccgcctcccaggttcaagccattctgttgcctcagcctcccgagtagctgggattacaggtgcctgccaccatgcctggctaatttttgcacttttagtagagacggggtttcaccatg[132 bp omitted]ttagataaaagttctttttttttccacaaggaaaataatgtcaaggtcaaaataagtatgtagagatgaatctctaaagttaatgttttatttggcaagaaagaattggaatttgaggcatacatgcagaccaaagaggagtctggggttttatagaaaaagaggagtgtggctgggcatgatggtttatgcctgtaatcccagcacttaggaaggctgaggtgggaatataacttgagatcaagagttcgagaccagcctggccaacatggcgagaccctatctctactaaaaatacaaaaattagctgggcacaatagtgggcacttagaatcccagctacttgggaggctgaggcgggagaatcgctggaacctaggaggcgctggttgtagtgactggagatcccagtcactactccagcctaggcgagagtaagactatgtcaataaataaataaataaataaataaaaagaccagcctgggttacatagcaggaccgcatctttccaacaacaaagaaaaagcccattgagttttttttttttttttttttgagacacagtctcactctgtcgcccaggctggagtgcagtggcacgatctcgggtcactgcagcctctgcctcccggactcaagtgatttctcctgcctc[198 bp omitted]tcaacactaaaggggccgggtgcggtggctgatgcctataaatctccgaatttcgaatttcgggaggctgaggagggcggatcacttgagtttgagattaggagttagagaccagcctggccaacatggcggaaatgcatctctactaaaactacaaaaattaaccgggcgtggtgactcgtgcctgtagtcccagctactcgggaggctgaggcag[136 bp omitted]gtacaaggcacttgtacttgacactgaaaggctttaatcaccaggggctgtggcagtgactgcgggactctattgctgagaggaggaaagcatcggaggtcaagtgactctcccaacgtcacccagcagggaaggggtggggcagggctggaatctggctgggcagggagggtgttggtgtcccccggggacttggggaggtgctggtggtgaaaccgcctttgcaaaattatgactgagacagttaaagagatctaacttcaccgactccctcttccttctaacctccaagctgtccttgttcatccctgggcataggctgaactaactttgggagaaacttatagtttaattaaattaattaattaattaattaattatttttttgagacggagtcttgctctgttgcccaggccggagtgcagtggtgcaatatcggctcactgcaacctctgcctcctgggttcaagcgattctcctacctcagcccccgcagtagctgggattacaggcgcccgccaccgcgcccagctaatttttgtatttttaatagagacagggtttcaccatgttggccaggctgatctcgaactcctgacctcaggtgatcttcccgcctcggcctcacaaagtgctgggattacaggcatgagccagggctcctggccgtgagagggggtttctccatgttggtcaggctggtctcgaactcctgacctcaggtgatctgcccgccttggcctcccaaagtgctgggattacaggggtgaatcaccgcgcctggcctttttttttttttttgtacccaataaacagcattgttgtcgaatgaatactggacttggagctacagcaagtcctggaccgtgactcttatggggggaaattcggatttttggttttactaagccgtgtgtggggaggtgtccggcgtcctcctcctgggacgggattcgaacccgctatccgacgggcccgcccacagggtctccccgggtccccgcttcgggccggcgagtgggggaaggggtcggccgagggcaaccgaggacgtgcgtgcgtacgttcgtgcgtgcgtggattcgggcgggcgggcgagtccacggggcggggcgccgagggggtggcgcgcgcgggtcggcccgctgggcggcgggcacgcgccggcgtcttcgctccgggctcccctagcgcgcggggcgagtggttccgcccggcccccggctcattgtgctcgcttcacgccggcccaagatggcggaggcgctggaggccccgggcctgtgactacaaagagggagtcgggggccgggccggaccggagcgcggcggcggcggcggcggcggccgaggccgaggccaggccccctcccctcagcctcccgcccctccctcccgcccgccctcctccgcccaccggcggccccgcccctcccccaaccgcccgcctagcatggtgcggcggccgcgcgcgcggacatgggggagaagctggagctgagactgaagtcgcccgtgggggctgagcccgccgtctacccgtggccgctgccggtctacgtgagtgccgccctccaccgtccctacctcccggcctcccctcctccgccgcccctggggacaccccaaacccccccaagccgcgctcaccggtcccccctgcggaacggagaccctggactccactgtcgctgctccacccccgttgcttcccggccgagggccccgcggctgtttcccgcagggtgggagccccgcgcgcctggggtgggagcgggagccggcgcccccgagccctaccgcggtgccgttgcccccgccgggctgtcccgggcgcggaacggaaggggtaactcgtgccggccgcgttttgactggaagcccgcccgcccgccccgctcgttcccggcgctgtcagtgtgtccgccgccttatttttctttttgagggcatcctttcctgtctcctcttctcttctttttaaaaattgggcgtttgtcacgcttttcctactcgggcacggcgggcccgaccctgcgaaggtgggagttaacgtccccttgagtgggcgggagcggtctgacctttggaaatggggaatttttgtccccgtaattttgagtgggtatgggctgccctggccctgggaaattaggcatctttgacctgttaatcctagttggttggggacaggctttatttatccttggaaattgggacttctccccgatcttgagtgggcaggattgggctcacccccggagttagtaaattttgtcttcttcatcttggtgaccgttggaaaatgacaggccgggtggaatgttacagaggcaccccaccgggtggttccagaaacccgcgtgcggctcccggggtgcgagtcccggcgtggcccctgaggaggcggggcgcgtgcgtccgcgcttgggaccctctggccacgctccgggctgggcagggcgcgttttcggggaaaagtgaagcaggcgctgtcagcgagcgtgtccggggcgcgagttttggggggcgcgtctgcagggcccggccgggcatccccgcgcgccctgggactcccgcgcgcgctgggcttgtgtcagtttttggaaacgtgctcgctgggggcggggtcaggacgcggagagcgctggggagcccgggctggctcactgccccgggtcggtgcgagtggatgggagagggagcgcagcttccagcctggccgcacgtcccgcgcgcggggctggcggggtagggccctggggctctggcttctctggttgggcagctccgggtgtgcgcctgggcggcctgagccgggatcccgccaggagaggtcctaggacaaaaactgaaagcagaggccgcgcttcagcgccccgaccggtttcctccctcgaaagttcaaactccagaacccttccagcctccacttctctctgttgggctctcatcgttttaggtggtagaaggcatatgaccataagagttctaactgtaactgactgaagatcaattgaggtggcttaccaccgtccgaccagccccagtacatggcttcacatttttttttttttttttgagacggagtctcgatctgtcgccaaagctggagtgcagcggcgcgatctcggctcgctgcaagctccgcctcccgggttcacgccattctcctgcctcagcctccccagtagctaggactataggcgcccgccaccacgcccggctaatgttttttgtgtttttagtagagacggggttt[131 bp omitted]atgttgttatttttggagtcggagtttcgctcttgttgcccaggctggagtgcaatggtgcgatctcggctcactgaaacctcagcctcccgggttcaagcgattctcctgcctcggcctccctggtaggtgggattacaggcatgcgccaccacaccctgctaattttgtatttttagtagagacggggtttc[133 bp omitted]tttgagaggaagtgttgcttttgttgcccagactggagtgcagtggtgccatctctgctcactgcatcgtctgcctcccgggttcaagcgattctcctgcctcagcctcctgagtagctgggattactggcatgagccaccacgtccggctaattttgtatttttagtagataccaggtttcttcatgttggctaggctggtctcgaactcctaacctcaggtgatccgcctgccttggcttcccaaagtgccgggattacaggggtgagccaccgcacctggcctcacatttattcgtatatcttcctctttcagttcacctagggcgtagttcgctggttgcagggtacagttctatacgttttgacaaactcattgggtggtgccctgaccagtgctgccgtccaggtgcagaacccccagcttccctgcggcgcccccatcctcagcttgcctgggagctcctggctgctccccacctggccttacctgtagttctgccattctcagaaagttggctgaatggaatcaacagcatgttgccctttggtcctggtggctttcaggcggccaaatccgtgttgctgcaggtttcaaaagttaccccatttttttgctgactgtaaatccattggacagttgggccacagattgttgacgtgtttgcctgtgggtcacaggactgtgggctgtttccaatttttggtgattagaataaacccgcactaaacaccactggcgggatttttggtgaaagtcagtgttcgcgtggcgaggttctcaggggtggaccgcacggcctgtgctaagcgtctgtttaacatctgcatcccaacagttgccacttgtcagtgctaagaaacccactggaacccagcgtcggggcctggggtagtggtcttgccagggaccctttgccttttccttggtactgaagtgaacattcacgtgaaggcagccctggtgtccccgcccgcatgcctgctgccctgcctggccagtgctccattgtaaatagtaagggcgagagctggcgggagcgggctttctagtggtgggcgggactgtgccgtgtctttccctccctggccaggccctggcttggcagggtgtgctggtcctggcgccgtctacggcctcttcctgctctggttggcccactgccgggcccagcatcttcattcgcccaagtgccagaggcagccttctgacaacctcgccgtgacatttgtcattttctgtgttcccgttgaggaat[131 bp omitted]agctccgcctcccaggtttcagtgattctcctgcctcagcctccccagtagctgggattacagacctgtgccaccatgcctggcttattttgtatttttagtagagacagggtttcaccatattggccaggctggtctcaaactcctgacctcaggtgatccgtccacctcggcctcccagagtgctgggatgacaggcgtgaaccaccgtgcccagacgcagctgcagcagcacatttattcatgattcattccaacagcagctactgaatactcagtgttgtgggggcacagaggacaacaagccaatattctccccccgccaccgccccagcattcttagtctcaagaaacctgtcaaatgaagacaggccgggcacaggggctcatgcctgtagtccctgcactttgggaagcccaggcgggaggattgcttgagcccaggagtttgagacaagccagggcaacatagggagactccatctctaccaaaaaatttaaaacagtgaagttaagtagattataaatagaagttcagcagagatactgtgctgagtacaaggtcagctgaggtccccagggaggggctgccacttctgccctgggggacctgtgggtggctgcttggaggaggggccatccggaggaggaagcagaaatagccacaactgtccacgctcggaaatgagcagttcggaaggggtttgcccaattggcaaacgcaagggggaggaagggagatttttattcttacatgacctgggagttcctggataaccgcttttctcaagccccgcatggcatttcttatttttttgagagggaatctcgtactgttgcctgggctggagtacaacggtgtgatctcggttcactgcaacatctgcctcctgggttcaagtgattctcctgtctcagcctccccagtaggtgggactacaggcacccgccaccacgcccagctaattttttgtatttttagtagcgacaggttttcactatgttggccaggctggtctcgaactcctgaccttgtcatctacctgcctgggcctcccagagtgctaggattacaggcatgagccaccgtgcctggccctgcgtggtatttctagggcaggatggccctgcccttcttctagtgggaagggcacaagtggcattattggttgtttgctcggaaagaaccttcaaaggccacagaacgggaccttccccctggtgactcacaggctgtgggcgggcaggggcggcctccactggccaagggtccggactctctgactctcattaatgagtgagtacatgttccgcctgacagcctggcctggagcccggctgtgggcggcggtgagtgggcagccagcagtgagtagcagccggggcggggtgagctgtccccaccgtgactcagaaggtattttctgctgctgacctctgagcttgagtgtcctgagtaatcccagctcccccggaggcagattaacctttaggcagctttgtgtgagtaaaggagtcgctttaaataggaaggaataatagaaaaaacccaagtgttccgttttatagcaaatgcacactgctttgttcctgctggcctgaaagaggttgcagggggtactggggcggggaattgtccagaaactctgcagatgatacagggacactccagcctagcctctgaggagagttttttttgagacggactcgctctgtctcccaggctggagtgcagtggcccaatctcggctcactgcagcctccgcctcctgggttcaagtgattctcctgcctcagcctcccgagtagctgggattacaggtgtgagccaccacgcccagctctttttttcctttaaaaatctgcttgttatctgctgctcatcagagtgtatatttggggtaattcgagcctgtgctcccaggttgcagtcctcaaatgtggcccaaataaatgctccacttatattaattttgctccagttcctttcctttagctcgacagtgtgaatctacaattatcttaaaataaaaagtttaattaaaaaaaacacacggttgcccaggcacggtggctcatgcctgtaatcccggcactttgggaggccaaggcgggcagatcacctgcggtcaggagttcgagaccagcttggccaacatgacgaaaccccgtatttaccaaaaatacaaaaattagctgggcgtggtggcggttgcctataatccggagaattgcttgaacccgagagggggaggctgcagtgagctgagatcatgccattacactccagactggtcgacagagtgagactctgtctcaaacaaacagacaaaattagataaaggaaaaaagaatttttgttcaagtaatattggccattgatggctgcaaatcactcttggtgttacagattccaggaacaggaagatagtgtccgagaccaggatgcaggaacagatagatgcctttccacgcttgcccctggtgtggttgggaggcgtgactgaaatccttgctcttgtctctctggacctgatgcattttgcatgcctcactgggcacggactgcttggagctgtttttatcttccagcagtgtgaggtgtaggaaggacccaacacggttcctcctgtgctctccgcagtcaacacagaggagttgcggaaccagatacgggtacccggggattcatcagttctgtgtttcctactgggcagccccgattcaactcacttccagcatgtctacctcgacacaggctcagatcccacggggtaagggctcagtccccaagactcccccactttccatgccagttagaggcctcacgttgtgacctgtgcttctgagtgaccggtcggctgtaaatccaggttcccgtcacccttacctcggcttgattacattgcctcagtggctcacagaactcccgagaaacacttaggtcctttggttaatgataaaggacgatctgtgggatgcccatgaatactgagaaatggatcctcagggcaaggcatgggggaagggcccactccctccaggagtctcccggaacgtgtgtctcccgggacctgtccccctccaggagtctcctggaacctgtccccctccaagagtctcccagaacctgtcctttagagtgttgtttctctcattatttttgggatagggtcttgctttgtcacccaggctggagtgcagtggc
